(19) United States
(12) Patent Application Publication
(10) Pub. No.: US 2023/0348871 A1
(43) Pub. Date: Nov. 2, 2023

(54) Targeted RNA cleavage with dCas13-RNase Fusion Proteins

(71) Applicant: University of Rochester, Rochester, NY (US)

(72) Inventor: Douglas Matthew Anderson, Pittsford, NY (US)

(21) Appl. No.: 18/005,311

(22) PCT Filed: Jul. 15, 2021
(86) PCT No.: PCT/US2021/041728

§ 371 Date: Jan. 12, 2023

Related U.S. Application Data
(60) Provisional application No. 63/052,121, filed on Jul. 15, 2020.
(60) Provisional application No. 63/052,238, filed on Jul. 15, 2020.

(51) Int. Cl. C12N 9/22; A61P 31/14; C12N 15/10

(52) U.S. Cl. CPC C12N 9/22; A61P 31/14; C12N 15/102; C12N 2310/20

(57) ABSTRACT

The present invention provides proteins, nucleic acids, systems and methods for modulating RNA. In some embodiments, the proteins, nucleic acids, systems and methods are used for targeted RNA cleavage. In other embodiments, the proteins, nucleic acids, systems and methods are used for trans-splicing of RNA molecules.

### CROSS-REFERENCE TO RELATED APPLICATIONS

[0001] This application claims priority to U.S. Provisional Patent Application No. 63/052,121, filed Jul. 15, 2020, and to U.S. Provisional Patent Application No. 63/052,238, filed Jul. 15, 2020, the contents of each of which are incorporated by reference herein in their entirety.

### REFERENCE TO A “SEQUENCE LISTING,” A TABLE, OR A COMPUTER PROGRAM LISTING APPENDIX SUBMITTED AS AN ASCII TEXT FILE

[0002] The present application hereby incorporates by reference the entire contents of the text file named “204606-0132-00WO Sequence Listing.txt” in ASCII format. The text file containing the Sequence Listing of the present application was created on Jul. 14, 2021, and is 961,054 bytes in size.

### BACKGROUND

[0003] RNA targeting, RNA-activated CRISPR-Cas13 systems are generally composed of a targeting CRISPR guide RNA (crRNA) and CRISPR associated protein, Cas13, which function as a programmable endoribonuclease (O'Connell, 2019, J Mol. Biol 431:66-87; Abudayyeh et al., 2018, Nature 550:280-84; Mohanraju et al., 2016, Science 343:aad5147). Cas13 proteins have two Higher Eukaryotes and Prokaryotes Nucleotide binding (HEPN) domains which allow for cleavage of single stranded RNA. In vitro and in bacteria, binding of a target RNA complementary to the guide-RNA results in constitutive activation of HEPN-RNase activity leading to target RNA degradation and non-specific RNA cleavage (collateral cleavage) (Abudayyeh et al., 2018, Nature 550:280-84; Abudayyeh et al., 2016, Science 343:aaf5573; Konermann et al., 2018, Cell 173:665-76). In mammalian cells, guide-RNA activation is more precise, resulting in cis-cleavage of the target RNA at multiple sites, but no detectable trans/collateral cleavage (FIG. 1A). Remarkably, catalytic inactivating mutations within the HEPN domains prevents Cas13 RNase activity, yet retains RNA targeting.

[0004] The rapid programmability, with almost no requirements for flanking crRNA sequence motifs (protospacer-flanking motifs, PFS), impart CRISPR-Cas13 with a remarkable ability for targeted RNA cleavage. However, CRISPR-Cas13 is only capable of cleaving single-stranded RNA (ssRNA) and results in complete target RNA degradation, which may not be optimal in all circumstances. Thus, there is a need in the art for compositions and methods for modulating and/or cleaving RNA.

### BRIEF DESCRIPTION OF THE DRAWINGS

[0005] FIG. 1, comprising FIG. 1A through FIG. 1C is a schematic depicting targeted RNA cleavage with dCas13-RNase fusion proteins. FIG. 1A is a schematic depicting CRISPR-Cas13 cleavage mechanisms. FIG. 1B is a schematic depicting CRISPRase cleavage mechanisms. FIG. 1C depicts experimental results demonstrating the relative activity of CRISPR-Cas13 and different CRISPRase fusion proteins targeting Luciferase mRNA in mammalian cells.

[0006] FIG. 2, comprising FIG. 2A through FIG. 2E, depicts CRISPRase fusion protein modifications. FIG. 2A through FIG. 2C are schematics depicting fusions of dCas13 to RNases with different RNA substrate specificities. FIG. 2A is a schematic depicting fusion of dCas13 to RNase with substrate specificity to ssRNA. FIG. 2B is a schematic depicting fusion of dCas13 to a RNase tandem dimer with substrate specificity to ssRNA or dsRNA. FIG. 2D and FIG. 2E are schematics depicting structural placement of RNase domains with dCas13 to specify RNA cleavage or allow for multiple cleavage sites. FIG. 2D is a schematic depicting a RNase-dCas13 fusion protein allowing for cleavage 5′ of the crRNA target site. FIG. 2E is a schematic depicting a RNase-dCas13-RNase fusion protein allowing for cleavage sites flanking the crRNA target site.

[0007] FIG. 3, comprising FIG. 3A through FIG. 3C, depicts guide-RNA modifications to prevent or enable specific CRISPRase activity. FIG. 3A is a schematic demonstrating that extending guide RNA lengths can be used to inhibit cleavage by CRISPRases specific for ssRNA, or allow for nucleotide-specific cleavage by including an unpaired bulge. FIG. 3B is a schematic demonstrating that extending guide-RNA lengths can allow for cleavage by dsRNA-specific RNases by creating dsRNA substrates, or focus cleavage by creating flanking bulges with unpaired residues. FIG. 3C is a schematic demonstrating that the addition of single or multiple DNA oligos complementary to the target RNA can allow for cleavage by RNAses which are specific for cleaving RNA in RNA:DNA hybrid substrate.

[0008] FIG. 4, comprising FIG. 4A through FIG. 4C, is a schematic depicting inducible CRISPRase activity using split RNase complementation. RNase1/RNaseA ribonucleases can be split into components S-peptide and S-protein, each possessing no separate catalytic activity, and reform in trans, regaining catalytic activity. FIG. 4A depicts the fusion of dCas13 to S-protein to allow for ‘inducible’ CRISPRase cleavage when complemented with corresponding S-peptide. Fusion of the S-peptide to small molecule-responsive protein domains, such as ERT2 and tamoxifen (tmx), can be used to create drug-activated CRISPRase cleavage systems. FIG. 4B depicts the fusion of dCas13 to S-peptide to allow for ‘inducible’ CRISPRase cleavage when complemented with corresponding S-protein. Fusion of the S-protein to small molecule-responsive protein domains, such as ERT2 and tamoxifen (tmx), can be used to create drug-activated CRISPRase cleavage systems. FIG. 4C is a schematic demonstrating fusion of dCas13 to multiple S-peptide domains in tandem which can be used to enhance CRISPRase RNA target cleavage.

[0009] FIG. 5, comprising FIG. 5A through FIG. 5F, depicts experimental results demonstrating therapeutic application of CRISPRases to both degrade toxic RNA foci and rescue host gene expression. FIG. 5A is a schematic depicting luciferase reporter genes encoding the human DMPK 3′ UTR sequence encoding either 12 or 960 copies of a CUG repeat (pGL3P-DT12a or pGL3P-DT960, respectively. FIG. 5B depicts relative luciferase activities of pGL3P-DT12a and pGL3P-DT960 luciferase reporter genes. (C) Luciferase activity of the pGL3P-DT960 reporter targeted with a CUG targeting guide RNA (CAG crRNA) by eraseR, dCas13, or CRISPRases, relative to non-targeting negative control guide RNA. (D) Number of RNA foci per cell, induced by expression of an RNA encompassing the human DMPK 3′UTR containing 960 CUG repeats, targeted by eraser or CRISPRases, with a CUG targeting guide RNA (CAG crRNA) or non-targeting negative control guide RNA (NC crRNA).

[0010] FIG. 6, comprising FIG. 6A through FIG. 6C, depicts a schematic demonstrating the use novel fusion editing proteins for the trans-splicing of RNA via targeted RNAse cleavage. Targeted RNAse cleavage, such as that performed by CRISPRases, generates unique RNA termini that may be subject to trans-RNA splicing in cells or in vitro when catalyzed by RtcB ligase. FIG. 6A depicts the use of CRISPRases targeted with multiple guide RNAs to direct the assembly of independent RNAs. FIG. 6B depicts the use of CRISPRases targeted with multiple guide RNAs to delete a sequence within a single RNA. FIG. 6C depicts the use of CRISPRases with both N and C terminal RNAse fusions for targeting via a single guide RNA to delete a specific internal RNA sequence.

### DETAILED DESCRIPTION

[0011] In one aspect, the disclosure is based on the development of novel fusion proteins which provide targeted RNA cleavage. In one embodiment, the fusion protein comprises a catalytically dead CRISPR-associated (dCas) protein and a RNase protein. These fusion proteins combine the catalytic activity of the RNase protein and the programmable DNA targeting capability of catalytically dead Cas. In one embodiment, the RNase protein is txRNase 1, RNase T1, Ribonuclease HI, PIN RNase, or RNase A. In one embodiment, the RNase is a RNase dimer. In one embodiment, the fusion protein further comprises a nuclear localization signal (NLS). In some embodiments, the fusion protein does not comprise an NLS, and is thus suitable for targeting RNA in the cytoplasm.

[0012] In one embodiment, the fusion protein comprises a catalytically dead CRISPR-associated (dCas) protein and an s-protein. The dCas-s-Protein fusion protein can be delivered with an s-peptide in trans, to provide RNase catalytic activity. Thus, in one embodiment, the disclosure provides a composition comprising a dCas-s-Protein fusion protein and an s-peptide.

[0013] In another aspect, the present invention comprises novel fusions of editing proteins, compositions thereof, and methods of use thereof for trans-splicing RNA molecules. In some embodiments, the fusion editing protein generates 2′,3′ cyclic phosphate and 5′ hydroxyl RNA termini. In one embodiment, the 2′,3′ cyclic phosphate and 5′ hydroxyl RNA termini can be ligated to one another. In one embodiment, ligation is mediated by RtcB ligase.

### Definitions

[0014] Unless defined otherwise, all technical and scientific terms used herein have the same meaning as commonly understood by one of ordinary skill in the art to which this invention belongs.

[0015] Generally, the nomenclature used herein and the laboratory procedures in cell culture, molecular genetics, organic chemistry, and nucleic acid chemistry and hybridization are those well-known and commonly employed in the art.

[0016] Standard techniques are used for nucleic acid and peptide synthesis. The techniques and procedures are generally performed according to conventional methods in the art and various general references (e.g., Sambrook and Russell, 2012, Molecular Cloning, A Laboratory Approach, Cold Spring Harbor Press, Cold Spring Harbor, NY, and Ausubel et al., 2012, Current Protocols in Molecular Biology, John Wiley & Sons, NY), which are provided throughout this document.

[0017] The nomenclature used herein and the laboratory procedures used in analytical chemistry and organic syntheses described below are those well-known and commonly employed in the art. Standard techniques or modifications thereof are used for chemical syntheses and chemical analyses.

[0018] The term “a,” “an,” “the” and similar terms used in the context of the present invention (especially in the context of the claims) are to be construed to cover both the singular and plural unless otherwise indicated herein or clearly contradicted by the context.

[0019] “About” as used herein when referring to a measurable value such as an amount, a temporal duration, and the like, is meant to encompass variations of ±20%, or ±10%, or ±5%, or ±1%, or ±0.1% from the specified value, as such variations are appropriate to perform the disclosed methods.

[0020] “Antisense” refers particularly to the nucleic acid sequence of the non-coding strand of a double stranded DNA molecule encoding a protein, or to a sequence which is substantially homologous to the non-coding strand. As defined herein, an antisense sequence is complementary to the sequence of a double stranded DNA molecule encoding a protein. It is not necessary that the antisense sequence be complementary solely to the coding portion of the coding strand of the DNA molecule. The antisense sequence may be complementary to regulatory sequences specified on the coding strand of a DNA molecule encoding a protein, which regulatory sequences control expression of the coding sequences.

[0021] A “disease” is a state of health of an animal wherein the animal cannot maintain homeostasis, and wherein if the disease is not ameliorated then the animal's health continues to deteriorate.

[0022] In contrast, a “disorder” in an animal is a state of health in which the animal is able to maintain homeostasis, but in which the animal's state of health is less favorable than it would be in the absence of the disorder. Left untreated, a disorder does not necessarily cause a further decrease in the animal's state of health.

[0023] A disease or disorder is “alleviated” if the severity of a sign or symptom of the disease or disorder, the frequency with which such a sign or symptom is experienced by a patient, or both, is reduced.

[0024] “Encoding” refers to the inherent property of specific sequences of nucleotides in a polynucleotide, such as a gene, a cDNA, or an mRNA, to serve as templates for synthesis of other polymers and macromolecules in biological processes having either a defined sequence of nucleotides (i.e., rRNA, tRNA and mRNA) or a defined sequence of amino acids and the biological properties resulting therefrom. Thus, a gene encodes a protein if transcription and translation of mRNA corresponding to that gene produces the protein in a cell or other biological system. Both the coding strand, the nucleotide sequence of which is identical to the mRNA sequence and is usually provided in sequence listings, and the non-coding strand, used as the template for transcription of a gene or cDNA, can be referred to as encoding the protein or other product of that gene or cDNA.

[0025] The terms “patient,” “subject,” “individual,” and the like are used interchangeably herein, and refer to any animal or cell whether in vitro or in vivo, amenable to the methods described herein. In one embodiment, the subjects include vertebrates and invertebrates. Invertebrates include, but are not limited to, Drosophila melanogaster and Caenorhabditis elegans. Vertebrates include, but are not limited to, primates, rodents, domestic animals or game animals. Primates include, but are not limited to, chimpanzees, cynomologous monkeys, spider monkeys, and macaques (e.g., Rhesus). Rodents include, but are not limited to, mice, rats, woodchucks, ferrets, rabbits and hamsters. Domestic and game animals include, but are not limited to, cows, horses, pigs, deer, bison, buffalo, feline species (e.g., domestic cat), canine species (e.g., dog, fox, wolf), avian species (e.g., chicken, emu, ostrich), and fish (e.g., zebrafish, trout, catfish and salmon). In some embodiments, the subject is a mammal, e.g., a primate, e.g., a human. In certain non-limiting embodiments, the patient, subject or individual is a human.

[0026] By the term “specifically binds,” as used herein with respect to an antibody, is meant an antibody which recognizes a specific antigen, but does not substantially recognize or bind other molecules in a sample. For example, an antibody that specifically binds to an antigen from one species may also bind to that antigen from one or more species. But, such cross-species reactivity does not itself alter the classification of an antibody as specific. In another example, an antibody that specifically binds to an antigen may also bind to different allelic forms of the antigen. However, such cross reactivity does not itself alter the classification of an antibody as specific.

[0027] In some instances, the terms “specific binding” or “specifically binding,” can be used in reference to the interaction of an antibody, a protein, or a peptide with a second chemical species, to mean that the interaction is dependent upon the presence of a particular structure (e.g., an antigenic determinant or epitope) on the chemical species; for example, an antibody recognizes and binds to a specific protein structure rather than to proteins generally. If an antibody is specific for epitope “A”, the presence of a molecule containing epitope A (or free, unlabeled A), in a reaction containing labeled “A” and the antibody, will reduce the amount of labeled A bound to the antibody.

[0028] A “coding region” of a gene consists of the nucleotide residues of the coding strand of the gene and the nucleotides of the non-coding strand of the gene which are homologous with or complementary to, respectively, the coding region of an mRNA molecule which is produced by transcription of the gene.

[0029] A “coding region” of a mRNA molecule also consists of the nucleotide residues of the mRNA molecule which are matched with an anti-codon region of a transfer RNA molecule during translation of the mRNA molecule or which encode a stop codon. The coding region may thus include nucleotide residues comprising codons for amino acid residues which are not present in the mature protein encoded by the mRNA molecule (e.g., amino acid residues in a protein export signal sequence).

[0030] “Complementary” as used herein to refer to a nucleic acid, refers to the broad concept of sequence complementarity between regions of two nucleic acid strands or between two regions of the same nucleic acid strand. It is known that an adenine residue of a first nucleic acid region is capable of forming specific hydrogen bonds (“base pairing”) with a residue of a second nucleic acid region which is antiparallel to the first region if the residue is thymine or uracil. Similarly, it is known that a cytosine residue of a first nucleic acid strand is capable of base pairing with a residue of a second nucleic acid strand which is antiparallel to the first strand if the residue is guanine. A first region of a nucleic acid is complementary to a second region of the same or a different nucleic acid if, when the two regions are arranged in an antiparallel fashion, at least one nucleotide residue of the first region is capable of base pairing with a residue of the second region. In one embodiment, the first region comprises a first portion and the second region comprises a second portion, whereby, when the first and second portions are arranged in an antiparallel fashion, at least about 50%, at least about 75%, at least about 90%, or at least about 95% of the nucleotide residues of the first portion are capable of base pairing with nucleotide residues in the second portion. In one embodiment, all nucleotide residues of the first portion are capable of base pairing with nucleotide residues in the second portion.

[0031] The term “DNA” as used herein is defined as deoxyribonucleic acid.

[0032] The term “expression” as used herein is defined as the transcription and/or translation of a particular nucleotide sequence driven by its promoter.

[0033] The term “expression vector” as used herein refers to a vector containing a nucleic acid sequence coding for at least part of a gene product capable of being transcribed. In some cases, RNA molecules are then translated into a protein, polypeptide, or peptide. In other cases, these sequences are not translated, for example, in the production of antisense molecules, siRNA, ribozymes, and the like. Expression vectors can contain a variety of control sequences, which refer to nucleic acid sequences necessary for the transcription and possibly translation of an operatively linked coding sequence in a particular host organism. In addition to control sequences that govern transcription and translation, vectors and expression vectors may contain nucleic acid sequences that serve other functions as well.

[0034] As used herein the term “wild type” is a term of the art understood by skilled persons and means the typical form of an organism, strain, gene or characteristic as it occurs in nature as distinguished from mutant or variant forms.

[0035] The term “homology” refers to a degree of complementarity. There may be partial homology or complete homology (i.e., identity). Homology is often measured using sequence analysis software (e.g., Sequence Analysis Software Package of the Genetics Computer Group. University of Wisconsin Biotechnology Center. 1710 University Avenue. Madison, Wis. 53705). Such software matches similar sequences by assigning degrees of homology to various substitutions, deletions, insertions, and other modifications. Conservative substitutions typically include substitutions within the following groups: glycine, alanine; valine, isoleucine, leucine; aspartic acid, glutamic acid, asparagine, glutamine; serine, threonine; lysine, arginine; and phenylalanine, tyrosine.

[0036] By “nucleic acid” is meant any nucleic acid, whether composed of deoxyribonucleosides or ribonucleosides, and whether composed of phosphodiester linkages or modified linkages such as phosphotriester, phosphoramidate, siloxane, carbonate, carboxymethylester, acetamidate, carbamate, thioether, bridged phosphoramidate, bridged methylene phosphonate, phosphorothioate, methylphosphonate, phosphorodithioate, bridged phosphorothioate or sulfone linkages, and combinations of such linkages. The term nucleic acid also specifically includes nucleic acids composed of bases other than the five biologically occurring bases (adenine, guanine, thymine, cytosine and uracil). The term “nucleic acid” typically refers to large polynucleotides.

[0037] Conventional notation is used herein to describe polynucleotide sequences: the left-hand end of a single-stranded polynucleotide sequence is the 5′-end; the left-hand direction of a double-stranded polynucleotide sequence is referred to as the 5′-direction.

[0038] The direction of 5′ to 3′ addition of nucleotides to nascent RNA transcripts is referred to as the transcription direction. The DNA strand having the same sequence as an mRNA is referred to as the “coding strand”; sequences on the DNA strand which are located 5′ to a reference point on the DNA are referred to as “upstream sequences”; sequences on the DNA strand which are 3′ to a reference point on the DNA are referred to as “downstream sequences.”

[0039] In the context of the present invention, the following abbreviations for the commonly occurring nucleic acid bases are used. “A” refers to adenosine, “C” refers to cytosine, “G” refers to guanosine, “T” refers to thymidine, and “U” refers to uridine.

[0040] As used herein, the terms “peptide,” “polypeptide,” and “protein” are used interchangeably, and refer to a compound comprised of amino acid residues covalently linked by peptide bonds. A protein or peptide must contain at least two amino acids, and no limitation is placed on the maximum number of amino acids that can comprise a protein's or peptide's sequence. Polypeptides include any peptide or protein comprising two or more amino acids joined to each other by peptide bonds. As used herein, the term refers to both short chains, which also commonly are referred to in the art as peptides, oligopeptides and oligomers, for example, and to longer chains, which generally are referred to in the art as proteins, of which there are many types. “Polypeptides” include, for example, biologically active fragments, substantially homologous polypeptides, oligopeptides, homodimers, heterodimers, variants of polypeptides, modified polypeptides, derivatives, analogs, fusion proteins, among others. The polypeptides include natural peptides, recombinant peptides, synthetic peptides, or a combination thereof.

[0041] The term “RNA” as used herein is defined as ribonucleic acid.

[0042] “Variant” as the term is used herein, is a nucleic acid sequence or a peptide sequence that differs in sequence from a reference nucleic acid sequence or peptide sequence respectively, but retains essential biological properties of the reference molecule. Changes in the sequence of a nucleic acid variant may not alter the amino acid sequence of a peptide encoded by the reference nucleic acid, or may result in amino acid substitutions, additions, deletions, fusions and truncations. Changes in the sequence of peptide variants are typically limited or conservative, so that the sequences of the reference peptide and the variant are closely similar overall and, in many regions, identical. A variant and reference peptide can differ in amino acid sequence by one or more substitutions, additions, deletions in any combination. A variant of a nucleic acid or peptide can be a naturally occurring such as an allelic variant, or can be a variant that is not known to occur naturally. Non-naturally occurring variants of nucleic acids and peptides may be made by mutagenesis techniques or by direct synthesis.

[0043] A “vector” is a composition of matter which comprises an isolated nucleic acid and which can be used to deliver the isolated nucleic acid to the interior of a cell. Numerous vectors are known in the art including, but not limited to, linear polynucleotides, polynucleotides associated with ionic or amphiphilic compounds, plasmids, and viruses. Thus, the term “vector” includes an autonomously replicating plasmid or a virus. The term should also be construed to include non-plasmid and non-viral compounds which facilitate transfer of nucleic acid into cells, such as, for example, polylysine compounds, liposomes, and the like. Examples of viral vectors include, but are not limited to, adenoviral vectors, adeno-associated virus vectors, retroviral vectors, and the like.

[0044] Ranges: throughout this disclosure, various aspects of the invention can be presented in a range format. It should be understood that the description in range format is merely for convenience and brevity and should not be construed as an inflexible limitation on the scope of the invention. Accordingly, the description of a range should be considered to have specifically disclosed all the possible subranges as well as individual numerical values within that range. For example, description of a range such as from 1 to 6 should be considered to have specifically disclosed subranges such as from 1 to 3, from 1 to 4, from 1 to 5, from 2 to 4, from 2 to 6, from 3 to 6 etc., as well as individual numbers within that range, for example, 1, 2, 2.7, 3, 4, 5, 5.3, and 6. This applies regardless of the breadth of the range.

### Fusion Proteins

[0045] In one aspect, the present disclosure is based on the development of novel fusions of editing proteins and RNase proteins which provide targeted RNA cleavage. In some embodiments, the fusion proteins are effectively delivered to a cell. These fusion proteins combine the catalytic activity of the RNase protein and the programmable DNA targeting capability of catalytically dead Cas. In one embodiment, the present invention provides fusion proteins comprising a CRISPR-associated (Cas) protein, and an RNase protein. In one embodiment, the fusion protein comprises a nuclear localization signal, to target RNA in the nucleus. In one embodiments, the fusion protein does not comprise an nuclear export signal (NES), to target RNA in the cytoplasm. In other embodiments, the fusion protein does not comprise an NLS, to target RNA in the cytoplasm. Other localization signals can be used (and which are known in the art) to target RNA in organelles, such as mitochondria. In one embodiment, the fusion protein comprises a linker. In one embodiment, the linker links the Cas protein and RNase protein. In one embodiment, the fusion protein comprises a purification and/or detection tag.

[0046] In another aspect, the present invention comprises novel fusions of editing proteins, and compositions thereof, for trans-splicing RNA molecules in cells or in vitro. In one embodiment, the invention relates to a composition comprising one or more novel fusion of an editing protein or a nucleic acid encoding said novel fusion of an editing protein, as described herein, one or more targeting nucleic acid, as described herein, and one or more RNA molecules. In one embodiment, the composition further comprises RtcB ligase or nucleic acid encoding RtcB ligase.

### Editing Protein

[0047] In one embodiment, the editing protein includes, but is not limited to, a CRISPR-associated (Cas) protein, a zinc finger nuclease (ZFN) protein, and a protein having a DNA or RNA binding domain.

[0048] Non-limiting examples of Cas proteins include Cas1, Cas1B, Cas2, Cas3, Cas4, Cas5, Cas6, Cas7, Cas8, Cas9, Cas10, Csy1, Csy2, Csy3, Cse1, Cse2, Csc1, Csc2, Csa5, Csn2. Csm2, Csm3, Csm4, Csm5, Csm6, Cmr1, Cmr3, Cmr4, Cmr5, Cmr6, Csb1, Csb2, Csb3, Csx17, Csx14, Csx10, Csx16, CsaX, Csx3, Csx1, Csx15, Csf1, Csf2, Csf3, Csf4, SpCas9, StCas9, NmCas9, SaCas9, CjCas9, CjCas9, AsCpf1, LbCpf1, FnCpf1, VRER SpCas9, VQR SpCas9, xCas9 3.7, homologs thereof, orthologs thereof, or modified versions thereof. In some embodiments, the Cas protein has DNA or RNA cleavage activity. In some embodiments, the Cas protein directs cleavage of one or both strands of a nucleic acid molecule at the location of a target sequence, such as within the target sequence and/or within the complement of the target sequence. In some embodiments, the Cas protein directs cleavage of one or both strands within about 1, 2, 3, 4, 5, 6, 7, 8, 9, 10, 15, 20, 25, 50, 100, 200, 500, or more base pairs from the first or last nucleotide of a target sequence. In one embodiment, the Cas protein is Cas9, Cas13, or Cpf1. In one embodiment, Cas protein is catalytically deficient (dCas).

[0049] In one embodiment, the Cas protein has RNA binding activity. In one embodiment, Cas protein is Cas13. In one embodiment, the Cas protein is PspCas13b, PspCas13b Truncation, AdmCas13d, AspCas13b, AspCas13c, BmaCas13a, BzoCas13b, CamCas13a, CcaCas13b, Cga2Cas13a, CgaCas13a, EbaCas13a, EreCas13a, EsCas13d, FbrCas13b, FnbCas13c, FndCas13c, FnfCas13c, FnsCas13c, FpeCas13c, FulCas13c, HheCas13a, LbfCas13a, LbmCas13a, LbnCas13a, LbuCas13a, LseCas13a, LshCas13a, LspCas13a, Lwa2cas13a, LwaCas13a, LweCas13a, PauCas13b, PbuCas13b, PgiCas13b, PguCas13b, Pin2Cas13b, Pin3Cas13b, PinCas13b, Pprcas13a, PsaCas13b, PsmCas13b, RaCas13d, RanCas13b, RcdCas13a, RcrCas13a, RcsCas13a, RfxCas13d, UrCas13d, dPspCas13b, PspCas13b_A133H, PspCas13b_A1058H, dPspCas13b truncation, dAdmCas13d, dAspCas13b, dAspCas13c, dBmaCas13a, dBzoCas13b, dCamCas13a, dCcaCas13b, dCga2Cas13a, dCgaCas13a, dEbaCas13a, dEreCas13a, dEsCas13d, dFbrCas13b, dFnbCas13c, dFndCas13c, dFnfCas13c, dFnsCas13c, dFpeCas13c, dFulCas13c, dHheCas13a, dLbfCas13a, dLbmCas13a, dLbnCas13a, dLbuCas13a, dLseCas13a, dLshCas13a, dLspCas13a, dLwa2cas13a, dLwaCas13a, dLweCas13a, dPauCas13b, dPbuCas13b, dPgiCas13b, dPguCas13b, dPin2Cas13b, dPin3Cas13b, dPinCas13b, dPprCas13a, dPsaCas13b, dPsmCas13b, dRaCas13d, dRanCas13b, dRcdCas13a, dRcrCas13a, dRcsCas13a, dRfxCas13d, dUrCas13d, dCas13X.1, or mini-dCas13X.1. Additional Cas proteins are known in the art (e.g., Konermann et al., Cell, 2018, 173:665-676 e14, Yan et al., Mol Cell, 2018, 7:327-339 e5; Cox, D. B. T., et al., Science, 2017, 358: 1019-1027; Abudayyeh et al., Nature, 2017, 550: 280-284, Gootenberg et al., Science, 2017, 356: 438-442; and East-Seletsky et al., Mol Cell, 2017, 66: 373-383 e3, which are herein incorporated by reference).

[0050] In one embodiment, the Cas protein comprises a sequence at least 70%, at least 71%, at least 72%, at least 73%, at least 74%, at least 75%, at least 76%, at least 77%, at least 78%, at least 79%, at least 80%, at least 81%, at least 82%, at least 83%, at least 84%, at least 85%, at least 86%, at least 87%, at least 88%, at least 89%, at least 90%, at least 91%, at least 92%, at least 93%, at least 94%, at least 95%, at least 96%, at least 97%, at least 98%, or at least 99% identical to one of SEQ ID NOs:1-48 and 826. In one embodiment, the Cas protein comprises a sequence of a variant of one of SEQ ID NOs: 1-48 and 826, wherein the variant renders the Cas protein catalytically inactive. In one embodiment, the Cas protein comprises a sequence of one of SEQ ID NOs: 1-46 and 826 having one or more insertions, deletions or substitutions, wherein the one or more insertions, deletions or substitutions renders the Cas protein catalytically inactive. In one embodiment, the Cas protein comprises a sequence of one of SEQ ID NOs:1-48 and 826. In one embodiment, the Cas protein comprises a sequence of one of SEQ ID NOs:47-48.

### RNase

[0051] In one embodiment, the fusion protein comprises an RNase protein. In one embodiment, the fusion protein comprises two RNase proteins. In one embodiment, the fusion protein comprises three or more RNase proteins. In one embodiment, the fusion protein comprises two identical RNase proteins. In one embodiment, the fusion protein comprises three or more identical RNase proteins. In one embodiment, the fusion protein comprises two different RNase proteins. In one embodiment, the fusion protein comprises three or more different RNase proteins.

[0052] In one embodiment, the RNase protein is heterologous to the Cas protein. In one embodiment, the RNase is capable of cleaving a phosphodiester bond within a polynucleotide chain. In one embodiment, the RNase is capable of cleavage of one or more of single-stranded RNA (ssRNA), double-stranded RNA (dsRNA), or RNA in a hybrid RNA:DNA complex. In one embodiment, the RNase comprises sequence specific cleavage activity. In various embodiments, the RNase is an endonuclease.

[0053] In one embodiment, the RNase is RNase 1, RNase 2, RNase 3, RNase 4, RNase 5, RNase 6, RNase 7, RNase 8, RNase A, RNase 1, RNase 1B, txRNase 1 (RNase 1 R39D/N67D/N88A/G89D/R91D), txRNase A (RNase A D38R/R39D/N67R/G88R), RNase T1, RNase T2, Onconase, Erns(C171R), RNase U2, PIN RNase domain, Bovine seminal ribonuclease (SRN), RNase V1, Mini RNase III (MiniR3), RNase III Domain (DICER), Ribonuclease HI (RNase HI*), or Ribonuclease HI(D125N)(RNase HI*D125N).

[0054] In one embodiment, the RNase protein comprises a sequence at least 70%, at least 71%, at least 72%, at least 73%, at least 74%, at least 75%, at least 76%, at least 77%, at least 78%, at least 79%, at least 80%, at least 81%, at least 82%, at least 83%, at least 84%, at least 85%, at least 86%, at least 87%, at least 88%, at least 89%, at least 90%, at least 91%, at least 92%, at least 93%, at least 94%, at least 95%, at least 96%, at least 97%, at least 98%, or at least 99% identical to one of SEQ ID NOs:49-89. In one embodiment, the RNase protein comprises a sequence of one of SEQ ID NOs: 49-89.

[0055] In one embodiment, the RNase is a dimer of RNase monomers. In one embodiment, the RNase dimer is capable of cleaving dsRNA or ssRNA. In one embodiment, the RNase dimer is linked together with a linking sequence. In one embodiment, the RNase dimer is a homodimer. In one embodiment, the RNase dimer is a heterodimer. In one embodiment, the RNase dimer is a natural dimer. In one embodiment, the RNase dimer is a synthetic dimer. In one embodiment, the RNase dimer is Synthetic Tandem Dimer RNase 1 (tdRNase 1), Synthetic tandem PIN RNase domain (tdPIN), Synthetic Tandem Dimer Bovine seminal ribonuclease (tdSRN), Synthetic Tandem Dimer Mini RNase III (tdMiniR3), Synthetic Tandem Dimer RNase III Domain (tdDICER), Synthetic tandem RNase III domain (tdRNC), Natural tandem RNase III domain (DROSHA), or Natural tandem RNase III domain Dimer (giDICER). In one embodiment, the RNase dimer comprises a sequence at least 70%, at least 71%, at least 72%, at least 73%, at least 74%, at least 75%, at least 76%, at least 77%, at least 78%, at least 79%, at least 80%, at least 81%, at least 82%, at least 83%, at least 84%, at least 85%, at least 86%, at least 87%, at least 88%, at least 89%, at least 90%, at least 91%, at least 92%, at least 93%, at least 94%, at least 95%, at least 96%, at least 97%, at least 98%, or at least 99% identical to one of SEQ ID NOs: 57, 77, 79, 82, and 84-87. In one embodiment, the RNase dimer comprises a sequence of one of SEQ ID NOs: 57, 77, 79, 82, and 84-87.

[0056] In one embodiment, the RNase protein is a fragment of a RNase protein. In one embodiment, the fragment of the RNase protein is capable of being complemented with a second fragment of the RNase protein in trans providing inducible catalytic activity. In one embodiment, the fragment of the RNase protein is a fragment of RNase is RNase 1, RNase 2, RNase 3, RNase 4, RNase 5, RNase 6, RNase 7, RNase 8, RNase A, RNase 1, RNase 1B, txRNase 1 (RNase 1 R39D/N67D/N88A/G89D/R91D), txRNase A (RNase A D38R/R39D/N67R/G88R), RNase T1, RNase T2, Onconase, Erns(C171R), RNase U2, PIN RNase domain, Bovine seminal ribonuclease (SRN), RNase V1, Mini RNase III (MiniR3), RNase III Domain (DICER), Ribonuclease HI (RNase HI*), or Ribonuclease HI(D125N)(RNase HI*D125N).

[0057] In one embodiment, the fragment of the RNase protein is a fragment of RNase1. In one embodiment, the fragment of the RNase protein is an s-protein. In one embodiment, the s-protein comprises a sequence at least 70%, at least 71%, at least 72%, at least 73%, at least 74%, at least 75%, at least 76%, at least 77%, at least 78%, at least 79%, at least 80%, at least 81%, at least 82%, at least 83%, at least 84%, at least 85%, at least 86%, at least 87%, at least 88%, at least 89%, at least 90%, at least 91%, at least 92%, at least 93%, at least 94%, at least 95%, at least 96%, at least 97%, at least 98%, or at least 99% identical to one of SEQ ID NOs: 90, 93, and 96. In one embodiment, the s-protein comprises a sequence of one of SEQ ID NOs: 90, 93, and 96.

[0058] In one embodiment, the fragment of the RNase protein is an s-peptide. In one embodiment, the s-peptide comprises a sequence at least 70%, at least 71%, at least 72%, at least 73%, at least 74%, at least 75%, at least 76%, at least 77%, at least 78%, at least 79%, at least 80%, at least 81%, at least 82%, at least 83%, at least 84%, at least 85%, at least 86%, at least 87%, at least 88%, at least 89%, at least 90%, at least 91%, at least 92%, at least 93%, at least 94%, at least 95%, at least 96%, at least 97%, at least 98%, or at least 99% identical to one of SEQ ID NOs: 91, 92, 94, 95, and 97-99. In one embodiment, the s-peptide comprises a sequence of one of SEQ ID NOs: 91, 92, 94, 95, and 97-99.

### Localization Signals

[0059] In some embodiments, the fusion protein may contain a localization signal, such as an nuclear localization signal (NLS), nuclear export signal (NES) or other localization signals to localize to organelles, such as mitochondria. In one embodiment, the localization signal localizes the fusion protein to the site in which the target RNA is located.

[0060] Nuclear Localization Signal

[0061] In one embodiment, the fusion protein comprises a NLS. In one embodiment, the NLS is a retrotransposon NLS. In one embodiment, the NLS is derived from Ty1, yeast GAL4, SKI3, L29 or histone H2B proteins, polyoma virus large T protein, VP1 or VP2 capsid protein, SV40 VP1 or VP2 capsid protein, Adenovirus El a or DBP protein, influenza virus NS1 protein, hepatitis vims core antigen or the mammalian lamin, c-myc, max, c-myb, p53, c-erbA, jun, Tax, steroid receptor or Mx proteins, Nucleoplasmin (NPM2), Nucleophosmin (NPM1), or simian vims 40 (“SV40”) T-antigen. In one embodiment, the NLS is a Ty1 or Ty1-derived NLS, a Ty2 or Ty2-derived NLS or a MAK11 or MAK11-derived NLS. In one embodiment, the Ty1 NLS comprises an amino acid sequence of SEQ ID NO:110. In one embodiment, the Ty2 NLS comprises an amino acid sequence of SEQ ID NO:111. In one embodiment, the MAK11 NLS comprises an amino acid sequence of SEQ ID NO:112. In one embodiment, the NLS comprises a sequence at least 70%, at least 71%, at least 72%, at least 73%, at least 74%, at least 75%, at least 76%, at least 77%, at least 78%, at least 79%, at least 80%, at least 81%, at least 82%, at least 83%, at least 84%, at least 85%, at least 86%, at least 87%, at least 88%, at least 89%, at least 90%, at least 91%, at least 92%, at least 93%, at least 94%, at least 95%, at least 96%, at least 97%, at least 98%, or at least 99% identical to one of SEQ ID NOs:110-730. In one embodiment, the NLS protein comprises a sequence of one of SEQ ID NOs: 110-730.

[0062] In one embodiment, the NLS is a Ty1-like NLS. For example, in one embodiment, the Ty1-like NLS comprises KKRX motif. In one embodiment, the Ty1-like NLS comprises KKRX motif at the N-terminal end. In one embodiment, the Ty1-like NLS comprises KKR motif. In one embodiment, the Ty1-like NLS comprises KKR motif at the C-terminal end. In one embodiment, the Ty1-like NLS comprises a KKRX and a KKR motif. In one embodiment, the Ty1-like NLS comprises a KKRX at the N-terminal end and a KKR motif at the C-terminal end. In one embodiment, the Ty1-like NLS comprises at least 20 amino acids. In one embodiment, the Ty1-like NLS comprises between 20 and 40 amino acids. In one embodiment, the Ty1-like NLS comprises a sequence at least 70%, at least 71%, at least 72%, at least 73%, at least 74%, at least 75%, at least 76%, at least 77%, at least 78%, at least 79%, at least 80%, at least 81%, at least 82%, at least 83%, at least 84%, at least 85%, at least 86%, at least 87%, at least 88%, at least 89%, at least 90%, at least 91%, at least 92%, at least 93%, at least 94%, at least 95%, at least 96%, at least 97%, at least 98%, or at least 99% identical to one of SEQ ID NOs:118-730. In one embodiment, the NLS comprises a sequence of one of SEQ ID NOs:118-730, wherein the sequence comprises one or more, two or more, three or more, four or more, five or more, six or more, seven or more, eight or more, nine or more, or ten or more, insertions, deletions or substitutions. In one embodiment, the Ty1-like NLS protein comprises a sequence of one of SEQ ID NOs:118-730.

[0063] In one embodiment, the NLS comprises two copies of the same NLS. For example, in one embodiment, the NLS comprises a multimer of a first Ty1-derived NLS and a second Ty1-derived NLS.

[0064] Nuclear Export Signal

[0065] In one embodiment, the fusion protein comprises a Nuclear Export Signal (NES). In one embodiment, the NES is attached to the N-terminal end of the Cas protein. In one embodiment, the NES localizes the fusion protein to the cytoplasm for targeting cytoplasmic RNA. In one embodiment, the NES comprises an amino acid sequence at least 70%, at least 71%, at least 72%, at least 73%, at least 74%, at least 75%, at least 76%, at least 77%, at least 78%, at least 79%, at least 80%, at least 81%, at least 82%, at least 83%, at least 84%, at least 85%, at least 86%, at least 87%, at least 88%, at least 89%, at least 90%, at least 91%, at least 92%, at least 93%, at least 94%, at least 95%, at least 96%, at least 97%, at least 98%, or at least 99% identical to SEQ ID NO:802 or 803. In one embodiment, the NES comprises an amino acid sequence of SEQ ID NO: 802 or 803.

[0066] Organelle Localization Signal

[0067] In one embodiment, the fusion protein comprises a localization signal that localizes the fusion protein to an organelle. In one embodiment, the localization signal localizes the protein to the nucleolus, ribosome, vesicle, rough endoplasmic reticulum, Golgi apparatus, cytoskeleton, smooth endoplasmic reticulum, mitochondria, vacuole, cytosol, lysosome, or centriole. A number of localization signals are known in the art.

[0068] In one embodiment, the fusion protein comprises a localization signal that localizes the fusion protein to an organelle or extracellularly. In one embodiment, the localization signal localizes the protein to the nucleolus, ribosome, vesicle, rough endoplasmic reticulum, Golgi apparatus, cytoskeleton, smooth endoplasmic reticulum, mitochondria, vacuole, cytosol, lysosome, or centriole.

[0069] A number of localization signals are known in the art. Exemplary localization signals include, but are not limited to 1x mitochondrial targeting sequence, 4x mitochondrial targeting sequence, secretory signal sequence (IL-2), myristylation, Calsequestrin leader, KDEL retention and peroxisome targeting sequence.

[0070] In one embodiment, the fusion protein comprises sequence at least 70%, at least 71%, at least 72%, at least 73%, at least 74%, at least 75%, at least 76%, at least 77%, at least 78%, at least 79%, at least 80%, at least 81%, at least 82%, at least 83%, at least 84%, at least 85%, at least 86%, at least 87%, at least 88%, at least 89%, at least 90%, at least 91%, at least 92%, at least 93%, at least 94%, at least 95%, at least 96%, at least 97%, at least 98%, or at least 99% identical to SEQ ID NO:806-812. In one embodiment, the fusion protein comprises sequence of SEQ ID NO: 806-812.

### Linker

[0071] In one embodiment, the fusion protein comprises a linker. In one embodiment, the linker links the Cas protein and RNase protein. In one embodiment, the linker is connected to the C-terminal end of the Cas protein and to the N-terminal end of the RNase protein. In one embodiment, the linker is connected to the N-terminal end of the Cas protein and to the C-terminal end of the RNase protein. Linkers can be flexible linkers, such as linkers composed predominately of Gly and Ser amino acid residues, or more rigid linkers, which may include amino acids such as Ala and Pro (among others). In one embodiment, the linker comprises a sequence at least 70%, at least 71%, at least 72%, at least 73%, at least 74%, at least 75%, at least 76%, at least 77%, at least 78%, at least 79%, at least 80%, at least 81%, at least 82%, at least 83%, at least 84%, at least 85%, at least 86%, at least 87%, at least 88%, at least 89%, at least 90%, at least 91%, at least 92%, at least 93%, at least 94%, at least 95%, at least 96%, at least 97%, at least 98%, or at least 99% identical to one of SEQ ID NOs:100-108. In one embodiment, the linker comprises a sequence at of one of SEQ ID NOs: 100-108.

Purification and/or Detection Tag

[0072] In one embodiment, the fusion protein comprises a purification and/or detection tag. In one embodiment, the tag is on the N-terminal end of the fusion protein. In one embodiment, the tag is a 3×FLAG tag. In one embodiment, the tag comprises an amino acid sequence at least 70%, at least 71%, at least 72%, at least 73%, at least 74%, at least 75%, at least 76%, at least 77%, at least 78%, at least 79%, at least 80%, at least 81%, at least 82%, at least 83%, at least 84%, at least 85%, at least 86%, at least 87%, at least 88%, at least 89%, at least 90%, at least 91%, at least 92%, at least 93%, at least 94%, at least 95%, at least 96%, at least 97%, at least 98%, or at least 99% identical to SEQ ID NO:109. In one embodiment, the tag comprises an amino acid sequence of SEQ ID NO:109.

### Proteins, Peptides and Fusion Proteins

[0073] The proteins of the present disclosure may be made using chemical methods. For example, protein can be synthesized by solid phase techniques (Roberge J Y et al (1995) Science 269: 202-204), cleaved from the resin, and purified by preparative high-performance liquid chromatography. Automated synthesis may be achieved, for example, using the ABI 431 A Peptide Synthesizer (Perkin Elmer) in accordance with the instructions provided by the manufacturer.

[0074] The proteins of the present disclosure may be made using recombinant protein expression. The recombinant expression vectors of the disclosure comprise a nucleic acid of the invention in a form suitable for expression of the nucleic acid in a host cell, which means that the recombinant expression vectors include one or more regulatory sequences, selected on the basis of the host cells to be used for expression, that is operatively-linked to the nucleic acid sequence to be expressed. Within a recombinant expression vector, “operably-linked” is intended to mean that the nucleotide sequence of interest is linked to the regulatory sequences in a manner that allows for expression of the nucleotide sequence (e.g., in an in vitro transcription/translation system or in a host cell when the vector is introduced into the host cell).

[0075] The term “regulatory sequence” is intended to include promoters, enhancers and other expression control elements (e.g., polyadenylation signals). Such regulatory sequences are described, for example, in Goeddel, Gene Expression Technology: Methods in Enzymology 185, Academic Press, San Diego, Calif. (1990). Regulatory sequences include those that direct constitutive expression of a nucleotide sequence in many types of host cell and those that direct expression of the nucleotide sequence only in certain host cells (e.g., tissue-specific regulatory sequences). It will be appreciated by those skilled in the art that the design of the expression vector can depend on such factors as the choice of the host cell to be transformed, the level of expression of protein desired, etc. The expression vectors of the invention can be introduced into host cells to thereby produce proteins or peptides, including fusion proteins or peptides, encoded by nucleic acids as described herein.

[0076] The recombinant expression vectors of the invention can be designed for production of variant proteins in prokaryotic or eukaryotic cells. For example, proteins of the invention can be expressed in bacterial cells such as Escherichia coli, insect cells (using baculovirus expression vectors) yeast cells or mammalian cells. Suitable host cells are discussed further in Goeddel, Gene Expression Technology: Methods in Enzymology 185, Academic Press, San Diego, Calif (1990). Alternatively, the recombinant expression vector can be transcribed and translated in vitro, for example using T7 promoter regulatory sequences and T7 polymerase.

[0077] Expression of proteins in prokaryotes is most often carried out in Escherichia coli with vectors containing constitutive or inducible promoters directing the expression of either fusion or non-fusion proteins. Fusion vectors add a number of amino acids to a protein encoded therein, to the amino or C terminus of the recombinant protein. Such fusion vectors typically serve three purposes: (i) to increase expression of recombinant protein; (ii) to increase the solubility of the recombinant protein; and (iii) to aid in the purification of the recombinant protein by acting as a ligand in affinity purification. Often, in fusion expression vectors, a proteolytic cleavage site is introduced at the junction of the fusion moiety and the recombinant protein to enable separation of the recombinant protein from the fusion moiety subsequent to purification of the fusion protein. Such enzymes, and their cognate recognition sequences, include Factor Xa, thrombin, PreScission, TEV and enterokinase. Typical fusion expression vectors include pGEX (Pharmacia Biotech Inc; Smith and Johnson, 1988. Gene 67: 31-40), pMAL (New England Biolabs, Beverly, Mass.) and pRITS (Pharmacia, Piscataway, N.J.) that fuse glutathione S-transferase (GST), maltose E binding protein, or protein A, respectively, to the target recombinant protein.

[0078] Examples of suitable inducible non-fusion E. coli expression vectors include pTrc (Amrann et al., (1988) Gene 69:301-315) and pET 11d (Studier et al., Gene Expression Technology: Methods in Enzymology 185, Academic Press, San Diego, Calif. (1990) 60-89)—not accurate, pET11a-d have N terminal T7 tag.

[0079] One strategy to maximize recombinant protein expression in E. coli is to express the protein in a host bacterium with an impaired capacity to proteolytically cleave the recombinant protein. See, e.g., Gottesman, Gene Expression Technology: Methods in Enzymology 185, Academic Press, San Diego, Calif. (1990) 119-128. Another strategy is to alter the nucleic acid sequence of the nucleic acid to be inserted into an expression vector so that the individual codons for each amino acid are those preferentially utilized in E. coli (see, e.g., Wada, et al., 1992. Nucl. Acids Res. 20: 2111-2118). Such alteration of nucleic acid sequences of the invention can be carried out by standard DNA synthesis techniques. Another strategy to solve codon bias is by using BL21-codon plus bacterial strains (Invitrogen) or Rosetta bacterial strain (Novagen), these strains contain extra copies of rare E. coli tRNA genes.

[0080] In another embodiment, the expression vector encoding for the protein of the disclosure is a yeast expression vector. Examples of vectors for expression in yeast Saccharomyces cerevisiae include pYepSec1 (Baldari, et al., 1987. EMBO J. 6: 229-234), pMFa (Kurjan and Herskowitz, 1982. Cell 30: 933-943), pJRY88 (Schultz et al., 1987. Gene 54: 113-123), pYES2 (Invitrogen Corporation, San Diego, Calif.), and picZ (InVitrogen Corp, San Diego, Calif.).

[0081] Alternatively, polypeptides of the present invention can be produced in insect cells using baculovirus expression vectors. Baculovirus vectors available for expression of proteins in cultured insect cells (e.g., SF9 cells) include the pAc series (Smith, et al., 1983. Mol. Cell. Biol. 3: 2156-2165) and the pVL series (Lucklow and Summers, 1989. Virology 170: 31-39).

[0082] In yet another embodiment, a nucleic acid of the disclosure is expressed in mammalian cells using a mammalian expression vector. Mammalian cell lines available in the art for expression of a heterologous polypeptide include Chinese hamster ovary (CHO) cells, HeLa cells, baby hamster kidney cells, NSO mouse melanoma cells, YB2/0 rat myeloma cells, human embryonic kidney cells, human embryonic retina cells and many others. Examples of mammalian expression vectors include pCDM8 (Seed, 1987. Nature 329: 840) and pMT2PC (Kaufman, et al., 1987. EMBO J. 6: 187-195), pIRESpuro (Clontech), pUB6 (Invitrogen), pCEP4 (Invitrogen) pREP4 (Invitrogen), pcDNA3 (Invitrogen). When used in mammalian cells, the expression vector's control functions are often provided by viral regulatory elements. For example, commonly used promoters are derived from polyoma, adenovirus 2, cytomegalovirus, Rous Sarcoma Virus, and simian virus 40. For other suitable expression systems for both prokaryotic and eukaryotic cells see, e.g., Chapters 16 and 17 of Sambrook, et al., Molecular Cloning: A Laboratory Manual. 2nd ed., Cold Spring Harbor Laboratory, Cold Spring Harbor Laboratory Press, Cold Spring Harbor, N.Y., 1989.

[0083] In another embodiment, the recombinant mammalian expression vector is capable of directing expression of the nucleic acid preferentially in a particular cell type (e.g., tissue-specific regulatory elements are used to express the nucleic acid). Tissue-specific regulatory elements are known in the art. Non-limiting examples of suitable tissue-specific promoters include the albumin promoter (liver-specific; Pinkert, et al., 1987. Genes Dev. 1: 268-277), lymphoid-specific promoters (Calame and Eaton, 1988. Adv. Immunol. 43: 235-275), in particular promoters of T cell receptors (Winoto and Baltimore, 1989. EMBO J. 8: 729-733) and immunoglobulins (Banerji, et al., 1983. Cell 33: 729-740; Queen and Baltimore, 1983. Cell 33: 741-748), neuron-specific promoters (e.g., the neurofilament promoter; Byrne and Ruddle, 1989. Proc. Natl. Acad. Sci. USA 86: 5473-5477), pancreas-specific promoters (Edlund, et al., 1985. Science 230: 912-916), and mammary gland-specific promoters (e.g., milk whey promoter; U.S. Pat. No. 4,873,316 and European Application Publication No. 264,166). Developmentally-regulated promoters are also encompassed, e.g., the murinehox promoters (Kessel and Gruss, 1990. Science 249: 374-379) and the alpha-fetoprotein promoter (Campes and Tilghman, 1989. Genes Dev. 3: 537-546).

[0084] The invention should also be construed to include any form of a protein having substantial homology to a protein disclosed herein. In one embodiment, a protein which is “substantially homologous” is about 50% homologous, about 70% homologous, about 80% homologous, about 90% homologous, about 91% homologous, about 92% homologous, about 93% homologous, about 94% homologous, about 95% homologous, about 96% homologous, about 97% homologous, about 98% homologous, or about 99% homologous to amino acid sequence of a fusion-protein disclosed herein.

[0085] The protein may alternatively be made by recombinant means or by cleavage from a longer polypeptide. The composition of a protein may be confirmed by amino acid analysis or sequencing.

[0086] The variants of the protein according to the present invention may be (i) one in which one or more of the amino acid residues are substituted with a conserved or non-conserved amino acid residue and such substituted amino acid residue may or may not be one encoded by the genetic code, (ii) one in which there are one or more modified amino acid residues, e.g., residues that are modified by the attachment of substituent groups, (iii) one in which the peptide is an alternative splice variant of the protein of the present invention, (iv) fragments of the peptides and/or (v) one in which the protein is fused with another peptide, such as a leader or secretory sequence or a sequence which is employed for purification (for example, His-tag) or for detection (for example, Sv5 epitope tag). The fragments include peptides generated via proteolytic cleavage (including multi-site proteolysis) of an original sequence. Variants may be post-translationally, or chemically modified. Such variants are deemed to be within the scope of those skilled in the art from the teaching herein.

[0087] As known in the art the “similarity” between two fusion proteins is determined by comparing the amino acid sequence and its conserved amino acid substitutes of one polypeptide to a sequence of a second polypeptide. Variants are defined to include peptide sequences different from the original sequence. In one embodiment, variants are different from the original sequence in less than 40% of residues per segment of interest different from the original sequence in less than 25% of residues per segment of interest, different by less than 10% of residues per segment of interest, or different from the original protein sequence in just a few residues per segment of interest and at the same time sufficiently homologous to the original sequence to preserve the functionality of the original sequence and/or the ability to stimulate the differentiation of a stem cell into the osteoblast lineage. The present invention includes amino acid sequences that are at least 60%, 65%, 70%, 72%, 74%, 76%, 78%, 80%, 90%, 91%, 92%, 93%, 94%, 95%, 96%, 97%, 98%, or 99% similar or identical to the original amino acid sequence. The degree of identity between two peptides is determined using computer algorithms and methods that are widely known for the persons skilled in the art. The identity between two amino acid sequences may be determined by using the BLASTP algorithm [BLAST Manual, Altschul, S., et al., NCBI NLM NIH Bethesda, Md. 20894, Altschul, S., et al., J. Mol. Biol. 215: 403-410 (1990)].

[0088] The protein of the disclosure can be post-translationally modified. For example, post-translational modifications that fall within the scope of the present invention include signal peptide cleavage, glycosylation, acetylation, isoprenylation, proteolysis, myristoylation, protein folding and proteolytic processing, etc. Some modifications or processing events require introduction of additional biological machinery. For example, processing events, such as signal peptide cleavage and core glycosylation, are examined by adding canine microsomal membranes or Xenopus egg extracts (U.S. Pat. No. 6,103,489) to a standard translation reaction.

[0089] The protein of the disclosure may include unnatural amino acids formed by post-translational modification or by introducing unnatural amino acids during translation. A variety of approaches are available for introducing unnatural amino acids during protein translation.

[0090] A protein of the disclosure may be phosphorylated using conventional methods such as the method described in Reedijk et al. (The EMBO Journal 11(4):1365, 1992).

[0091] Cyclic derivatives of the fusion proteins of the invention are also part of the present invention. Cyclization may allow the protein to assume a more favorable conformation for association with other molecules. Cyclization may be achieved using techniques known in the art. For example, disulfide bonds may be formed between two appropriately spaced components having free sulfhydryl groups, or an amide bond may be formed between an amino group of one component and a carboxyl group of another component. Cyclization may also be achieved using an azobenzene-containing amino acid as described by Ulysse, L., et al., J. Am. Chem. Soc. 1995, 117, 8466-8467. The components that form the bonds may be side chains of amino acids, non-amino acid components or a combination of the two. In an embodiment of the invention, cyclic peptides may comprise a beta-turn in the right position. Beta-turns may be introduced into the peptides of the invention by adding the amino acids Pro-Gly at the right position.

[0092] It may be desirable to produce a cyclic protein which is more flexible than the cyclic peptides containing peptide bond linkages as described above. A more flexible peptide may be prepared by introducing cysteines at the right and left position of the peptide and forming a disulfide bridge between the two cysteines. The two cysteines are arranged so as not to deform the beta-sheet and turn. The peptide is more flexible as a result of the length of the disulfide linkage and the smaller number of hydrogen bonds in the beta-sheet portion. The relative flexibility of a cyclic peptide can be determined by molecular dynamics simulations.

[0093] The invention also relates to peptides comprising a fusion protein comprising Cas13 and a RNase protein, wherein the fusion protein is itself fused to, or integrated into, a target protein, and/or a targeting domain capable of directing the chimeric protein to a desired cellular component or cell type or tissue. The chimeric proteins may also contain additional amino acid sequences or domains. The chimeric proteins are recombinant in the sense that the various components are from different sources, and as such are not found together in nature (i.e., are heterologous).

[0094] In one embodiment, the targeting domain can be a membrane spanning domain, a membrane binding domain, or a sequence directing the protein to associate with for example vesicles or with the nucleus. In one embodiment, the targeting domain can target a peptide to a particular cell type or tissue. For example, the targeting domain can be a cell surface ligand or an antibody against cell surface antigens of a target tissue. A targeting domain may target the peptide of the invention to a cellular component.

[0095] A peptide of the invention may be synthesized by conventional techniques. For example, the peptides or chimeric proteins may be synthesized by chemical synthesis using solid phase peptide synthesis. These methods employ either solid or solution phase synthesis methods (see for example, J. M. Stewart, and J. D. Young, Solid Phase Peptide Synthesis, 2nd Ed., Pierce Chemical Co., Rockford Ill. (1984) and G. Barany and R. B. Merrifield, The Peptides: Analysis Synthesis, Biology editors E. Gross and J. Meienhofer Vol. 2 Academic Press, New York, 1980, pp. 3-254 for solid phase synthesis techniques; and M Bodansky, Principles of Peptide Synthesis, Springer-Verlag, Berlin 1984, and E. Gross and J. Meienhofer, Eds., The Peptides: Analysis, Synthesis, Biology, suprs, Vol 1, for classical solution synthesis). By way of example, a peptide of the invention may be synthesized using 9-fluorenyl methoxycarbonyl (Fmoc) solid phase chemistry with direct incorporation of phosphothreonine as the N-fluorenylmethoxy-carbonyl-O-benzyl-L-phosphothreonine derivative.

[0096] N-terminal or C-terminal fusion proteins comprising a peptide or chimeric protein of the invention conjugated with other molecules may be prepared by fusing, through recombinant techniques, the N-terminal or C-terminal of the peptide or chimeric protein, and the sequence of a selected protein or selectable marker with a desired biological function. The resultant fusion proteins contain the protein fused to the selected protein or marker protein as described herein. Examples of proteins which may be used to prepare fusion proteins include immunoglobulins, glutathione-S-transferase (GST), hemagglutinin (HA), and truncated myc.

[0097] Peptides of the invention may be developed using a biological expression system. The use of these systems allows the production of large libraries of random peptide sequences and the screening of these libraries for peptide sequences that bind to particular proteins. Libraries may be produced by cloning synthetic DNA that encodes random peptide sequences into appropriate expression vectors (see Christian et al 1992, J. Mol. Biol. 227:711; Devlin et al, 1990 Science 249:404; Cwirla et al 1990, Proc. Natl. Acad, Sci. USA, 87:6378). Libraries may also be constructed by concurrent synthesis of overlapping peptides (see U.S. Pat. No. 4,708,871).

[0098] The peptides and chimeric proteins of the invention may be converted into pharmaceutical salts by reacting with inorganic acids such as hydrochloric acid, sulfuric acid, hydrobromic acid, phosphoric acid, etc., or organic acids such as formic acid, acetic acid, propionic acid, glycolic acid, lactic acid, pyruvic acid, oxalic acid, succinic acid, malic acid, tartaric acid, citric acid, benzoic acid, salicylic acid, benezenesulfonic acid, and toluenesulfonic acids.

[0099] In one embodiment, the fusion protein comprises an amino acid sequence at least 70%, at least 71%, at least 72%, at least 73%, at least 74%, at least 75%, at least 76%, at least 77%, at least 78%, at least 79%, at least 80%, at least 81%, at least 82%, at least 83%, at least 84%, at least 85%, at least 86%, at least 87%, at least 88%, at least 89%, at least 90%, at least 91%, at least 92%, at least 93%, at least 94%, at least 95%, at least 96%, at least 97%, at least 98%, or at least 99% identical to SEQ ID NO: 827, C-terminally linked to an RNase as described above. In one embodiment, the fusion protein comprises the amino acid sequence of SEQ ID NO: 827, C-terminally linked to an RNase.

[0100] In one embodiment, the fusion protein comprises an amino acid sequence at least 70%, at least 71%, at least 72%, at least 73%, at least 74%, at least 75%, at least 76%, at least 77%, at least 78%, at least 79%, at least 80%, at least 81%, at least 82%, at least 83%, at least 84%, at least 85%, at least 86%, at least 87%, at least 88%, at least 89%, at least 90%, at least 91%, at least 92%, at least 93%, at least 94%, at least 95%, at least 96%, at least 97%, at least 98%, or at least 99% identical to SEQ ID NO: 828, N-terminally linked to a first RNAase, and C-terminally linked to a second RNase. In one embodiment, the fusion protein comprises the amino acid sequence of SEQ ID NO: 828, N-terminally linked to a first RNAase, and C-terminally linked to a second RNase.

### Proteins for Trans-Splicing of RNA Molecules

[0101] In some embodiments, the present invention relates to novel fusions of editing proteins for trans-splicing RNA molecules in cells or in vitro. In one embodiment, the present invention comprises a composition comprising one or more novel fusion of an editing protein, as described herein, one or more targeting nucleic acid, as described herein, and one or more RNA molecule. In some embodiments, said one or more RNA molecule comprises a single RNA molecule. In some embodiments, said one or more RNA molecule comprises at least two RNA molecules. In one embodiment, the composition further comprises RtcB ligase or a nucleic acid encoding RtcB ligase. Exemplary RtcB ligase proteins and their corresponding amino acid sequences can be found in International Application No. PCT/US2021/016885 (incorporated by reference herein in its entirety).

### Nucleic Acids

[0102] In one aspect, the present disclosure provides nucleic acids encoding fusion proteins of the disclosure. In one embodiment, the nucleic acids encoding a fusion protein comprising an editing protein and a RNase protein. In one embodiment, the nucleic acids encoding a fusion protein comprising a Cas and a RNase protein. In one embodiment, the fusion proteins combine the catalytic activity of the RNase protein and the programmable nucleic acid targeting capability of catalytically dead Cas.

[0103] The present disclosure also provides targeting nucleic acids, including CRISPR RNAs (crRNAs), for targeting the fusion protein of the disclosure to a target RNA. In one embodiment, the crRNA is selected based on the RNase activity of the fusion protein. For example, in one the RNase of the fusion protein may be capable of cleaving one or more of ssRNA, dsRNA, or RNA:DNA complexes. Thus, the present disclosure provides crRNA allowing for targeted cleavage of ssRNA, dsRNA, or RNA:DNA complexes to be used with the fusion proteins of the disclosure.

### Nucleic Acids Encoding Fusion Proteins

[0104] In one aspect, the present disclosure is based on the development of novel nucleic acid molecules encoding fusions of editing proteins and RNase proteins, which are effectively delivered to the cell and provide targeted RNA cleavage. These fusion proteins combine the catalytic activity of the RNase protein and the programmable nucleic acid targeting capability of catalytically dead Cas. In one embodiment, nucleic acid molecule comprises a nucleic acid sequence encoding an editing protein; and a nucleic acid sequence encoding a RNase protein. In one embodiment, the nucleic acid molecule comprises a nucleic acid sequence encoding a localization signal (e.g., an NLS). In one embodiment, the nucleic acid molecule comprises a nucleic acid sequence encoding a linker. In one embodiment, the nucleic acid molecule comprises a nucleic acid sequence encoding a purification and/or detection tag.

[0105] Editing Protein

[0106] In one embodiment, the nucleic acid molecule comprises a sequence nucleic acid encoding an editing protein. In one embodiment, the editing protein includes, but is not limited to, a CRISPR-associated (Cas) protein, a zinc finger nuclease (ZFN) protein, and a protein having a DNA or RNA binding domain.

[0107] Non-limiting examples of Cas proteins include Cas1, Cas1B, Cas2, Cas3, Cas4, Cas5, Cas6, Cas7, Cas8, Cas9, Cas10, Csy1, Csy2, Csy3, Cse1, Cse2, Csc1, Csc2, Csa5, Csn2. Csm2, Csm3, Csm4, Csm5, Csm6, Cmr1, Cmr3, Cmr4, Cmr5, Cmr6, Csb1, Csb2, Csb3, Csx17, Csx14, Csx10, Csx16, CsaX, Csx3, Csx1, Csx15, Csf1, Csf2, Csf3, Csf4, SpCas9, StCas9, NmCas9, SaCas9, CjCas9, CjCas9, AsCpf1, LbCpf1, FnCpf1, VRER SpCas9, VQR SpCas9, xCas9 3.7, homologs thereof, orthologs thereof, or modified versions thereof. In some embodiments, the Cas protein has DNA or RNA cleavage activity. In some embodiments, the Cas protein directs cleavage of one or both strands of a nucleic acid molecule at the location of a target sequence, such as within the target sequence and/or within the complement of the target sequence. In some embodiments, the Cas protein directs cleavage of one or both strands within about 1, 2, 3, 4, 5, 6, 7, 8, 9, 10, 15, 20, 25, 50, 100, 200, 500, or more base pairs from the first or last nucleotide of a target sequence. In one embodiment, the Cas protein is Cas9, Cas13, or Cpf1. In one embodiment, Cas protein is catalytically deficient (dCas).

[0108] In one embodiment, the Cas protein has RNA binding activity. In one embodiment, Cas protein is Cas13. In one embodiment, the Cas protein is PspCas13b, PspCas13b Truncation, AdmCas13d, AspCas13b, AspCas13c, BmaCas13a, BzoCas13b, CamCas13a, CcaCas13b, Cga2Cas13a, CgaCas13a, EbaCas13a, EreCas13a, EsCas13d, FbrCas13b, FnbCas13c, FndCas13c, FnfCas13c, FnsCas13c, FpeCas13c, FulCas13c, HheCas13a, LbfCas13a, LbmCas13a, LbnCas13a, LbuCas13a, LseCas13a, LshCas13a, LspCas13a, Lwa2cas13a, LwaCas13a, LweCas13a, PauCas13b, PbuCas13b, PgiCas13b, PguCas13b, Pin2Cas13b, Pin3Cas13b, PinCas13b, Pprcas13a, PsaCas13b, PsmCas13b, RaCas13d, RanCas13b, RcdCas13a, RcrCas13a, RcsCas13a, RfxCas13d, UrCas13d, dPspCas13b, PspCas13b_A133H, PspCas13b_A1058H, dPspCas13b truncation, dAdmCas13d, dAspCas13b, dAspCas13c, dBmaCas13a, dBzoCas13b, dCamCas13a, dCcaCas13b, dCga2Cas13a, dCgaCas13a, dEbaCas13a, dEreCas13a, dEsCas13d, dFbrCas13b, dFnbCas13c, dFndCas13c, dFnfCas13c, dFnsCas13c, dFpeCas13c, dFulCas13c, dHheCas13a, dLbfCas13a, dLbmCas13a, dLbnCas13a, dLbuCas13a, dLseCas13a, dLshCas13a, dLspCas13a, dLwa2cas13a, dLwaCas13a, dLweCas13a, dPauCas13b, dPbuCas13b, dPgiCas13b, dPguCas13b, dPin2Cas13b, dPin3Cas13b, dPinCas13b, dPprCas13a, dPsaCas13b, dPsmCas13b, dRaCas13d, dRanCas13b, dRcdCas13a, dRcrCas13a, dRcsCas13a, dRfxCas13d, dUrCas13d, dCas13X.1, or mini-dCas13X.1. Additional Cas proteins are known in the art (e.g., Konermann et al., Cell, 2018, 173:665-676 e14, Yan et al., Mol Cell, 2018, 7:327-339 e5; Cox, D. B. T., et al., Science, 2017, 358: 1019-1027; Abudayyeh et al., Nature, 2017, 550: 280-284, Gootenberg et al., Science, 2017, 356: 438-442; and East-Seletsky et al., Mol Cell, 2017, 66: 373-383 e3, which are herein incorporated by reference).

[0109] In one embodiment, the nucleic acid sequence encoding a Cas protein comprises a nucleic acid sequence encoding an amino acid sequence at least 70%, at least 71%, at least 72%, at least 73%, at least 74%, at least 75%, at least 76%, at least 77%, at least 78%, at least 79%, at least 80%, at least 81%, at least 82%, at least 83%, at least 84%, at least 85%, at least 86%, at least 87%, at least 88%, at least 89%, at least 90%, at least 91%, at least 92%, at least 93%, at least 94%, at least 95%, at least 96%, at least 97%, at least 98%, or at least 99% identical to one of SEQ ID NOs: 1-48 and 826. In one embodiment, the nucleic acid sequence encoding a Cas protein comprises a nucleic acid sequence encoding an amino acid sequence of a variant of one of SEQ ID NOs:1-48 and 826, wherein the variant renders the Cas protein catalytically inactive. In one embodiment, the nucleic acid sequence encoding a Cas protein comprises a nucleic acid sequence encoding an amino acid sequence of one of SEQ ID NOs:1-46 and 826 having one or more insertions, deletions or substitutions, wherein the one or more insertions, deletions or substitutions renders the Cas protein catalytically inactive. In one embodiment, the nucleic acid sequence encoding a Cas protein comprises a nucleic acid sequence encoding an amino acid sequence of one of SEQ ID NOs:1-48 and 826. In one embodiment, the nucleic acid sequence encoding a Cas protein comprises a nucleic acid sequence encoding an amino acid sequence of one of SEQ ID NOs:47-48.

[0110] In one embodiment, the nucleic acid sequence encoding a Cas protein comprises a nucleic acid sequence at least 70%, at least 71%, at least 72%, at least 73%, at least 74%, at least 75%, at least 76%, at least 77%, at least 78%, at least 79%, at least 80%, at least 81%, at least 82%, at least 83%, at least 84%, at least 85%, at least 86%, at least 87%, at least 88%, at least 89%, at least 90%, at least 91%, at least 92%, at least 93%, at least 94%, at least 95%, at least 96%, at least 97%, at least 98%, or at least 99% identical to one of SEQ ID NOs: 734-737 and 823. In one embodiment, the nucleic acid sequence encoding a Cas protein comprises a of a variant of one of SEQ ID NOs: 734-735 and 823, wherein the variant renders the encoded Cas protein catalytically inactive. In one embodiment, the nucleic acid sequence encoding a Cas protein comprises a nucleic acid sequence of one of SEQ ID NOs: 734-735 and 823. In one embodiment, the nucleic acid sequence encoding a Cas protein comprises a nucleic acid sequence of one of SEQ ID NOs:736-737.

[0111] RNase

[0112] In one embodiment, the nucleic acid molecule comprises a nucleic acid sequence encoding an RNase protein. In one embodiment, the nucleic acid molecule encodes two RNase proteins. In one embodiment, the nucleic acid molecule encodes three or more RNase proteins. In one embodiment, the nucleic acid molecule encodes two identical RNase proteins. In one embodiment, the nucleic acid molecule encodes three or more identical RNase proteins. In one embodiment, the nucleic acid molecule encodes two different RNase proteins. In one embodiment, the nucleic acid molecule encodes three or more different RNase proteins.

[0113] In one embodiment, the RNase protein is heterologous to the Cas protein. In one embodiment, the RNase is capable of cleaving a phosphodiester bond within a polynucleotide chain. In one embodiment, the RNase is capable of cleavage of one or more of single-stranded RNA (ssRNA), double-stranded RNA (dsRNA), or RNA in a hybrid RNA:DNA complex. In one embodiment, the RNase comprises sequence specific cleavage activity.

[0114] In one embodiment, the RNase is RNase 1, RNase 2, RNase 3, RNase 4, RNase 5, RNase 6, RNase 7, RNase 8, RNase A, RNase 1, RNase 1B, txRNase 1 (RNase 1 R39D/N67D/N88A/G89D/R91D), txRNase A (RNase A D38R/R39D/N67R/G88R), RNase T1, RNase T2, Onconase, Erns(C171R), RNase U2, PIN RNase domain, Bovine seminal ribonuclease (SRN), RNase V1, Mini RNase III (MiniR3), RNase III Domain (DICER), Ribonuclease HI (RNase HI*), or Ribonuclease HI(D125N)(RNase HI*D125N).

[0115] In one embodiment, the nucleic acid molecule comprises a nucleic acid sequence encoding an RNase having an amino acid sequence at least 70%, at least 71%, at least 72%, at least 73%, at least 74%, at least 75%, at least 76%, at least 77%, at least 78%, at least 79%, at least 80%, at least 81%, at least 82%, at least 83%, at least 84%, at least 85%, at least 86%, at least 87%, at least 88%, at least 89%, at least 90%, at least 91%, at least 92%, at least 93%, at least 94%, at least 95%, at least 96%, at least 97%, at least 98%, or at least 99% identical to one of SEQ ID NOs:49-89. In one embodiment, the nucleic acid molecule comprises a nucleic acid sequence encoding an RNase having an amino acid sequence of one of SEQ ID NOs: 49-89.

[0116] In one embodiment, the nucleic acid sequence encoding a RNase protein comprises a nucleic acid sequence at least 70%, at least 71%, at least 72%, at least 73%, at least 74%, at least 75%, at least 76%, at least 77%, at least 78%, at least 79%, at least 80%, at least 81%, at least 82%, at least 83%, at least 84%, at least 85%, at least 86%, at least 87%, at least 88%, at least 89%, at least 90%, at least 91%, at least 92%, at least 93%, at least 94%, at least 95%, at least 96%, at least 97%, at least 98%, or at least 99% identical to one of SEQ ID NOs: 738-779. In one embodiment, the nucleic acid sequence encoding a RNase protein comprises a nucleic acid sequence of one of SEQ ID NOs: 738-779.

[0117] In one embodiment, the nucleic acid molecule encodes a dimer of RNase monomers. In one embodiment, the RNase dimer is linked together with a linking sequence. In one embodiment, the RNase dimer is a homodimer. In one embodiment, the RNase dimer is a heterodimer. In one embodiment, the RNase dimer is a natural dimer. In one embodiment, the RNase dimer is a synthetic dimer. In one embodiment, the RNase dimer is Synthetic Tandem Dimer RNase 1 (tdRNase 1), Synthetic tandem PIN RNase domain (tdPIN), Synthetic Tandem Dimer Bovine seminal ribonuclease (tdSRN), Synthetic Tandem Dimer Mini RNase III (tdMiniR3), Synthetic Tandem Dimer RNase III Domain (tdDICER), Synthetic tandem RNase III domain (tdRNC), Natural tandem RNase III domain (DROSHA), or Natural tandem RNase III domain Dimer (giDICER).

[0118] In one embodiment, the nucleic acid molecule comprises a nucleic acid sequence encoding an RNase dimer comprising an amino acid sequence at least 70%, at least 71%, at least 72%, at least 73%, at least 74%, at least 75%, at least 76%, at least 77%, at least 78%, at least 79%, at least 80%, at least 81%, at least 82%, at least 83%, at least 84%, at least 85%, at least 86%, at least 87%, at least 88%, at least 89%, at least 90%, at least 91%, at least 92%, at least 93%, at least 94%, at least 95%, at least 96%, at least 97%, at least 98%, or at least 99% identical to one of SEQ ID NOs: 57, 77, 79, 82, and 84-87. In one embodiment, the nucleic acid molecule comprises a nucleic acid sequence encoding an RNase dimer comprising an amino acid of one of SEQ ID NOs: 57, 77, 79, 82, and 84-87.

[0119] In one embodiment, the nucleic acid sequence encoding an RNase dimer comprises a nucleic acid sequence at least 70%, at least 71%, at least 72%, at least 73%, at least 74%, at least 75%, at least 76%, at least 77%, at least 78%, at least 79%, at least 80%, at least 81%, at least 82%, at least 83%, at least 84%, at least 85%, at least 86%, at least 87%, at least 88%, at least 89%, at least 90%, at least 91%, at least 92%, at least 93%, at least 94%, at least 95%, at least 96%, at least 97%, at least 98%, or at least 99% identical to one of SEQ ID NOs: 746, 767, 769, 772, and 774-777. In one embodiment, the nucleic acid sequence encoding an RNase dimer comprises a nucleic acid sequence of one of SEQ ID NOs: 746, 767, 769, 772, and 774-777.

[0120] In one embodiment, the nucleic acid molecule encodes a fragment of a RNase protein. In one embodiment, the fragment of the RNase protein is capable of being complemented with a second fragment of the RNase protein in trans providing inducible catalytic activity. In one embodiment, the fragment of the RNase protein is a fragment of RNase is RNase 1, RNase 2, RNase 3, RNase 4, RNase 5, RNase 6, RNase 7, RNase 8, RNase A, RNase 1, RNase 1B, txRNase 1 (RNase 1 R39DN67D/N88A/G89D/R91D), txRNase A (RNase A D38R/R39D/N67R/G88R), RNase T1, RNase T2, Onconase, Erns(C171R), RNase U2, PIN RNase domain, Bovine seminal ribonuclease (SRN), RNase V1, Mini RNase III (MiniR3), RNase III Domain (DICER), Ribonuclease HI (RNase HI*), or Ribonuclease HI(D125N)(RNase HI*D125N).

[0121] In one embodiment, the nucleic acid molecule encodes a fragment of RNase1. In one embodiment, the nucleic acid molecule encodes an s-protein. In one embodiment, the nucleic acid molecule comprises a nucleic acid sequence encoding s-protein comprising an amino acid sequence at least 70%, at least 71%, at least 72%, at least 73%, at least 74%, at least 75%, at least 76%, at least 77%, at least 78%, at least 79%, at least 80%, at least 81%, at least 82%, at least 83%, at least 84%, at least 85%, at least 86%, at least 87%, at least 88%, at least 89%, at least 90%, at least 91%, at least 92%, at least 93%, at least 94%, at least 95%, at least 96%, at least 97%, at least 98%, or at least 99% identical to one of SEQ ID NOs: 90, 93, and 96. In one embodiment, the nucleic acid molecule comprises a nucleic acid sequence encoding s-protein comprising an amino acid sequence of one of SEQ ID NOs: 90, 93, and 96.

[0122] In one embodiment, the nucleic acid sequence encoding an s-protein comprises a nucleic acid sequence at least 70%, at least 71%, at least 72%, at least 73%, at least 74%, at least 75%, at least 76%, at least 77%, at least 78%, at least 79%, at least 80%, at least 81%, at least 82%, at least 83%, at least 84%, at least 85%, at least 86%, at least 87%, at least 88%, at least 89%, at least 90%, at least 91%, at least 92%, at least 93%, at least 94%, at least 95%, at least 96%, at least 97%, at least 98%, or at least 99% identical to one of SEQ ID NOs: 780, 783, and 786. In one embodiment, the nucleic acid sequence encoding an s-protein comprises a nucleic acid sequence of one of SEQ ID NOs: 780, 783, and 786.

[0123] In one embodiment, the fragment of the RNase protein is an s-peptide. In one embodiment, the nucleic acid molecule comprises a nucleic acid sequence encoding s-peptide comprising an amino acid sequence at least 70%, at least 71%, at least 72%, at least 73%, at least 74%, at least 75%, at least 76%, at least 77%, at least 78%, at least 79%, at least 80%, at least 81%, at least 82%, at least 83%, at least 84%, at least 85%, at least 86%, at least 87%, at least 88%, at least 89%, at least 90%, at least 91%, at least 92%, at least 93%, at least 94%, at least 95%, at least 96%, at least 97%, at least 98%, or at least 99% identical to one of SEQ ID NOs: 91, 92, 94, 95, and 97-99. In one embodiment, the nucleic acid molecule comprises a nucleic acid sequence encoding s-peptide comprising an amino acid sequence of one of SEQ ID NOs: 91, 92, 94, 95, and 97-99.

[0124] In one embodiment, the nucleic acid sequence encoding an s-peptide comprises a nucleic acid sequence at least 70%, at least 71%, at least 72%, at least 73%, at least 74%, at least 75%, at least 76%, at least 77%, at least 78%, at least 79%, at least 80%, at least 81%, at least 82%, at least 83%, at least 84%, at least 85%, at least 86%, at least 87%, at least 88%, at least 89%, at least 90%, at least 91%, at least 92%, at least 93%, at least 94%, at least 95%, at least 96%, at least 97%, at least 98%, or at least 99% identical to one of SEQ ID NOs: 781, 782, 784, 785, and 787-789. In one embodiment, the nucleic acid sequence encoding an s-peptide comprises a nucleic acid sequence of one of SEQ ID NOs: 781, 782, 784, 785, and 787-789.

[0125] Localization Signal

[0126] In some embodiments, the nucleic acid molecule comprises a nucleic acid sequence encoding a localization signal, such as an nuclear localization signal (NLS), nuclear export signal (NES) or other localization signals to localize to organelles, such as mitochondria. In one embodiment, the localization signal localizes the fusion protein to the site in which the target RNA is located.

[0127] Nuclear Localization Signals

[0128] In one embodiment, the nucleic acid molecule comprises a nucleic acid sequence encoding a nuclear localization signal (NLS). In one embodiment, the NLS is a retrotransposon NLS. In one embodiment, the NLS is derived from Ty1, yeast GAL4, SKI3, L29 or histone H2B proteins, polyoma virus large T protein, VP1 or VP2 capsid protein, SV40 VP1 or VP2 capsid protein, Adenovirus El a or DBP protein, influenza virus NS1 protein, hepatitis vims core antigen or the mammalian lamin, c-myc, max, c-myb, p53, c-erbA, jun, Tax, steroid receptor or Mx proteins, Nucleoplasmin (NPM2), Nucleophosmin (NPM1), or simian vims 40 (“SV40”) T-antigen.

[0129] In one embodiment, the NLS is a Ty1 or Ty1-derived NLS, a Ty2 or Ty2-derived NLS or a MAK11 or MAK11-derived NLS. In one embodiment, the Ty1 NLS comprises an amino acid sequence of SEQ ID NO:110. In one embodiment, the Ty2 NLS comprises an amino acid sequence of SEQ ID NO:111. In one embodiment, the MAK11 NLS comprises an amino acid sequence of SEQ ID NO:112. In one embodiment, the nucleic acid sequence encoding a NLS comprises a nucleic acid sequence encoding an amino acid sequence at least 70%, at least 71%, at least 72%, at least 73%, at least 74%, at least 75%, at least 76%, at least 77%, at least 78%, at least 79%, at least 80%, at least 81%, at least 82%, at least 83%, at least 84%, at least 85%, at least 86%, at least 87%, at least 88%, at least 89%, at least 90%, at least 91%, at least 92%, at least 93%, at least 94%, at least 95%, at least 96%, at least 97%, at least 98%, or at least 99% identical to one of SEQ ID NOs: 110-730. In one embodiment, the nucleic acid sequence encoding a NLS comprises a nucleic acid sequence encoding an amino acid sequence of one of SEQ ID NOs: 110-730.

[0130] In one embodiment, the NLS is a Ty1-like NLS. For example, in one embodiment, the Ty1-like NLS comprises KKRX motif. In one embodiment, the Ty1-like NLS comprises KKRX motif at the N-terminal end. In one embodiment, the Ty1-like NLS comprises KKR motif. In one embodiment, the Ty1-like NLS comprises KKR motif at the C-terminal end. In one embodiment, the Ty1-like NLS comprises a KKRX and a KKR motif. In one embodiment, the Ty1-like NLS comprises a KKRX at the N-terminal end and a KKR motif at the C-terminal end. In one embodiment, the Ty1-like NLS comprises at least 20 amino acids. In one embodiment, the Ty1-like NLS comprises between 20 and 40 amino acids. In one embodiment, the nucleic acid sequence encoding a Ty1-like NLS comprises a nucleic acid sequence encoding an amino acid sequence at least 70%, at least 71%, at least 72%, at least 73%, at least 74%, at least 75%, at least 76%, at least 77%, at least 78%, at least 79%, at least 80%, at least 81%, at least 82%, at least 83%, at least 84%, at least 85%, at least 86%, at least 87%, at least 88%, at least 89%, at least 90%, at least 91%, at least 92%, at least 93%, at least 94%, at least 95%, at least 96%, at least 97%, at least 98%, or at least 99% identical to one of SEQ ID NOs: 118-730. In one embodiment, the nucleic acid sequence encoding a Ty1-like NLS comprises a nucleic acid sequence encoding an amino acid sequence of one of SEQ ID NOs: 118-730, wherein the sequence comprises one or more, two or more, three or more, four or more, five or more, six or more, seven or more, eight or more, nine or more, or ten or more, insertions, deletions or substitutions. In one embodiment, the nucleic acid sequence encoding a Ty1-like NLS comprises a nucleic acid sequence encoding an amino acid sequence of one of SEQ ID NOs: 118-730.

[0131] In one embodiment, the nucleic acid sequence encoding an NLS encodes two copies of the same NLS. For example, in one embodiment, the nucleic acid sequence encodes a multimer of a first Ty1-derived NLS and a second Ty1-derived NLS.

[0132] In one embodiment, the nucleic acid sequence encoding a NLS comprises a nucleic acid sequence at least 70%, at least 71%, at least 72%, at least 73%, at least 74%, at least 75%, at least 76%, at least 77%, at least 78%, at least 79%, at least 80%, at least 81%, at least 82%, at least 83%, at least 84%, at least 85%, at least 86%, at least 87%, at least 88%, at least 89%, at least 90%, at least 91%, at least 92%, at least 93%, at least 94%, at least 95%, at least 96%, at least 97%, at least 98%, or at least 99% identical to SEQ ID NO:794. In one embodiment, the nucleic acid sequence encoding a NLS comprises a nucleic acid sequence of SEQ ID NO: 794.

[0133] Nuclear Export Signal

[0134] In one embodiment, the nucleic acid molecule comprises a nucleic acid sequence encoding a Nuclear Export Signal (NES). In one embodiment, the NES localizes the fusion protein to the cytoplasm for targeting cytoplasmic RNA. In one embodiment, In one embodiment, the nucleic acid sequence encoding the NES comprises a sequence encoding an amino acid sequence at least 70%, at least 71%, at least 72%, at least 73%, at least 74%, at least 75%, at least 76%, at least 77%, at least 78%, at least 79%, at least 80%, at least 81%, at least 82%, at least 83%, at least 84%, at least 85%, at least 86%, at least 87%, at least 88%, at least 89%, at least 90%, at least 91%, at least 92%, at least 93%, at least 94%, at least 95%, at least 96%, at least 97%, at least 98%, or at least 99% identical to SEQ ID NO:802 or 803. In one embodiment, the nucleic acid sequence encoding the NES comprises a sequence encoding an amino acid sequence of SEQ ID NO: 802 or 803.

[0135] In one embodiment, the nucleic acid sequence encoding the NES comprises a sequence at least 70%, at least 71%, at least 72%, at least 73%, at least 74%, at least 75%, at least 76%, at least 77%, at least 78%, at least 79%, at least 80%, at least 81%, at least 82%, at least 83%, at least 84%, at least 85%, at least 86%, at least 87%, at least 88%, at least 89%, at least 90%, at least 91%, at least 92%, at least 93%, at least 94%, at least 95%, at least 96%, at least 97%, at least 98%, or at least 99% identical to SEQ ID NO:804 or 805. In one embodiment, the nucleic acid sequence encoding the NES comprises a sequence of SEQ ID NO: 804 or 805.

[0136] Organelle and Extracellular Localization Signal

[0137] In one embodiment, the nucleic acid molecule comprises a nucleic acid sequence encoding a localization signal that localizes the fusion protein to an organelle or extracellularly. In one embodiment, the localization signal localizes the protein to the nucleolus, ribosome, vesicle, rough endoplasmic reticulum, Golgi apparatus, cytoskeleton, smooth endoplasmic reticulum, mitochondria, vacuole, cytosol, lysosome, or centriole. A number of localization signals are known in the art.

[0138] Exemplary localization signals include, but are not limited to 1x mitochondrial targeting sequence, 4x mitochondrial targeting sequence, secretory signal sequence (IL-2), myristylation, Calsequestrin leader, KDEL retention and peroxisome targeting sequence.

[0139] In one embodiment, the nucleic acid molecule comprises a nucleic acid sequence encoding a localization signal. In one embodiment, the localization signal localizes the fusion protein to an organelle or extracellularly. In one embodiment, In one embodiment, the nucleic acid sequence encoding the localization signal comprises a sequence encoding an amino acid sequence at least 70%, at least 71%, at least 72%, at least 73%, at least 74%, at least 75%, at least 76%, at least 77%, at least 78%, at least 79%, at least 80%, at least 81%, at least 82%, at least 83%, at least 84%, at least 85%, at least 86%, at least 87%, at least 88%, at least 89%, at least 90%, at least 91%, at least 92%, at least 93%, at least 94%, at least 95%, at least 96%, at least 97%, at least 98%, or at least 99% identical to SEQ ID NO:806-812. In one embodiment, the nucleic acid sequence encoding the localization signal comprises a sequence encoding an amino acid sequence of SEQ ID NO: 806-812.

[0140] In one embodiment, the nucleic acid sequence encoding the localization signal comprises a sequence at least 70%, at least 71%, at least 72%, at least 73%, at least 74%, at least 75%, at least 76%, at least 77%, at least 78%, at least 79%, at least 80%, at least 81%, at least 82%, at least 83%, at least 84%, at least 85%, at least 86%, at least 87%, at least 88%, at least 89%, at least 90%, at least 91%, at least 92%, at least 93%, at least 94%, at least 95%, at least 96%, at least 97%, at least 98%, or at least 99% identical to SEQ ID NO:813-819. In one embodiment, the nucleic acid sequence encoding the localization signal comprises a sequence of SEQ ID NO:813-819.

[0141] Linker

[0142] In one embodiment, the nucleic acid molecule comprises a nucleic acid sequence encoding a linker peptide. In one embodiment, the linker links the Cas protein and RNase protein. In one embodiment, the linker is connected to the C-terminal end of the Cas protein and to the N-terminal end of the RNase protein. In one embodiment, the linker is connected to the N-terminal end of the Cas protein and to the C-terminal end of the RNase protein.

[0143] In one embodiment, the nucleic acid sequence encoding a linker peptide encodes an amino acid sequence at least 70%, at least 71%, at least 72%, at least 73%, at least 74%, at least 75%, at least 76%, at least 77%, at least 78%, at least 79%, at least 80%, at least 81%, at least 82%, at least 83%, at least 84%, at least 85%, at least 86%, at least 87%, at least 88%, at least 89%, at least 90%, at least 91%, at least 92%, at least 93%, at least 94%, at least 95%, at least 96%, at least 97%, at least 98%, or at least 99% identical to one of SEQ ID NOs:100-108. In one embodiment, the nucleic acid sequence encoding a linker peptide encodes an amino acid sequence of one of SEQ ID NOs: 100-108.

[0144] In one embodiment, the nucleic acid sequence encoding a linker peptide comprises a sequence at least 70%, at least 71%, at least 72%, at least 73%, at least 74%, at least 75%, at least 76%, at least 77%, at least 78%, at least 79%, at least 80%, at least 81%, at least 82%, at least 83%, at least 84%, at least 85%, at least 86%, at least 87%, at least 88%, at least 89%, at least 90%, at least 91%, at least 92%, at least 93%, at least 94%, at least 95%, at least 96%, at least 97%, at least 98%, or at least 99% identical to one of SEQ ID NOs:790-792. In one embodiment, the nucleic acid sequence encoding a linker peptide comprises sequence of one of SEQ ID NOs: 790-792.

[0145] Purification and/or Detection Tag

[0146] In one embodiment, the nucleic acid molecule comprises a nucleic acid sequence encoding a purification and/or detection tag. In one embodiment, the tag is on the N-terminal end of the fusion protein. In one embodiment, the tag is a 3×FLAG tag. In one embodiment, nucleic acid sequence encoding a purification and/or detection tag encodes an amino acid sequence at least 70%, at least 71%, at least 72%, at least 73%, at least 74%, at least 75%, at least 76%, at least 77%, at least 78%, at least 79%, at least 80%, at least 81%, at least 82%, at least 83%, at least 84%, at least 85%, at least 86%, at least 87%, at least 88%, at least 89%, at least 90%, at least 91%, at least 92%, at least 93%, at least 94%, at least 95%, at least 96%, at least 97%, at least 98%, or at least 99% identical to SEQ ID NO:109. In one embodiment, nucleic acid sequence encoding a purification and/or detection tag encodes an amino acid sequence of SEQ ID NO:109.

[0147] In one embodiment, nucleic acid sequence encoding a purification and/or detection tag comprises sequence at least 70%, at least 71%, at least 72%, at least 73%, at least 74%, at least 75%, at least 76%, at least 77%, at least 78%, at least 79%, at least 80%, at least 81%, at least 82%, at least 83%, at least 84%, at least 85%, at least 86%, at least 87%, at least 88%, at least 89%, at least 90%, at least 91%, at least 92%, at least 93%, at least 94%, at least 95%, at least 96%, at least 97%, at least 98%, or at least 99% identical to SEQ ID NO:793. In one embodiment, nucleic acid sequence encoding a purification and/or detection tag comprises a sequence of SEQ ID NO: 793.

[0148] Targeting Nucleic Acids and CRISPR RNAs (crRNAs)

[0149] In one aspect, the invention provides targeting nucleic acids, including CRISPR RNAs (crRNAs) for targeting Cas to a target RNA. In one embodiment, targeting nucleic acids is a crRNA. In one embodiment, the crRNA comprises guide sequence. In one embodiment, the crRNA comprises a direct repeat (DR) sequence. In one embodiment the crRNA comprises a direct repeat sequence and a guide sequence fused or linked to a guide sequence or spacer sequence. In one embodiment the direct repeat sequence may be located upstream (i.e., 5′) from the guide sequence or spacer sequence. In other embodiments, the direct repeat sequence may be located downstream (i.e., 3′) from the guide sequence or spacer sequence.

[0150] In some embodiments, the crRNA comprises a stem loop. In one embodiment, the crRNA comprises a single stem loop. In one embodiment, the direct repeat sequence forms a stem loop. In one embodiment, the direct repeat sequence forms a single stem loop.

[0151] In one embodiment, the crRNA is complementary to the RNase of the fusion protein. For example, in one embodiment, the RNase is capable of cleaving ssRNA and the crRNA guide sequence comprises a sequence having sufficient complementarity to a sequence adjacent to the target sequence. In one embodiment, the RNase is capable of cleaving ssRNA and the crRNA guide sequence comprises a sequence having sufficient complementarity to the target sequence and creating a bulge ssRNA at the target site.

[0152] In one embodiment, the RNase is capable of cleaving dsRNA and the crRNA guide sequence comprises a sequence having sufficient complementarity to the target sequence, thereby creating dsRNA capable of being cleaved by the RNase. In one embodiment, the RNase is capable of cleaving dsRNA and the crRNA guide sequence comprises a sequence having sufficient complementarity to the target sequence and mismatches 5′ and 3′ of the target site creating ssRNA bulge 5′ and 3′ of the target site, thereby creating dsRNA at the target site capable of being cleaved by the RNase.

[0153] In one embodiment, the targeting nucleic acid is a targeting DNA oligo. In one embodiment, the DNA oligo comprises a guide sequence comprises a sequence having sufficient complementarity to the target sequence. In one embodiment, the targeting DNA oligo can be delivered in combination with a crRNA. In one embodiment, the crRNA directs the Cas13-RNase fusion protein to the target site. In one embodiment, the crRNA directs the Cas13-RNase fusion protein to the target site, wherein the RNase is capable of cleaving an RNA:DNA complex. In one embodiment, the DNA oligo binds to the target site, thereby allowing the RNase of the Cas13-RNase fusion protein to cleave the target site.

[0154] In one embodiment, the spacer length of the guide RNA is from 15 to 35 nt. In one embodiment, the spacer length of the guide RNA is at least 15 nucleotides. In one embodiment the spacer length is from 15 to 17 nt, e.g., 15, 16, or 17 nt, from 17 to 20 nt, e.g., 17, 18, 19, or nt, from 20 to 24 nt, e.g., 20, 21, 22, 23, or 24 nt, from 23 to 25 nt, e.g., 23, 24, or 25 nt, from 24 to 27 nt, e.g., 24, 25, 26, or 27 nt, from 27-30 nt, e.g., 27, 28, 29, or 30 nt, from 30-35 nt, e.g., 30, 31, 32, 33, 34, or 35 nt, or 35 nt or longer.

[0155] In general, a guide sequence is any polynucleotide sequence having sufficient complementarity with a target polynucleotide sequence to hybridize with the target sequence and direct sequence-specific binding of a CRISPR complex to the target sequence. In some embodiments, the degree of complementarity between a guide sequence and its corresponding target sequence, when optimally aligned using a suitable alignment algorithm, is about or more than about 50%, 60%, 75%, 80%, 85%, 90%, 95%, 97.5%, 99%, or more. Optimal alignment may be determined with the use of any suitable algorithm for aligning sequences, non-limiting example of which include the Smith-Waterman algorithm, the Needleman-Wunsch algorithm, algorithms based on the Burrows-Wheeler Transform (e.g. the Burrows Wheeler Aligner), ClustalW, Clustal X, BLAT, Novoalign (Novocraft Technologies; available at www.novocraft.com), ELAND (Illumina, San Diego, Calif.), SOAP (available at soap.genomics.org.cn), and Maq (available at maq.sourceforge.net). In some embodiments, a guide sequence is about or more than about 5, 10, 11, 12, 13, 14, 15, 16, 17, 18, 19, 20, 21, 22, 23, 24, 25, 26, 27, 28, 29, 30, 35, 40, 45, 50, 75, or more nucleotides in length. In some embodiments, a guide sequence is less than about 75, 50, 45, 40, 35, 30, 25, 20, 15, 12, or fewer nucleotides in length. Preferably the guide sequence is 10 30 nucleotides long. The ability of a guide sequence to direct sequence-specific binding of a CRISPR complex to a target sequence may be assessed by any suitable assay. For example, the components of a CRISPR system sufficient to form a CRISPR complex, including the guide sequence to be tested, may be provided to a host cell having the corresponding target sequence, such as by transfection with vectors encoding the components of the CRISPR sequence, followed by an assessment of preferential cleavage within the target sequence, such as by Surveyor assay as described herein. Similarly, cleavage of a target polynucleotide sequence may be evaluated in a test tube by providing the target sequence, components of a CRISPR complex, including the guide sequence to be tested and a control guide sequence different from the test guide sequence, and comparing binding or rate of cleavage at the target sequence between the test and control guide sequence reactions. Other assays are possible, and will occur to those skilled in the art.

[0156] In some embodiments of CRISPR-Cas systems, the degree of complementarity between a guide sequence and its corresponding target sequence can be about or more than about 50%, 60%, 75%, 80%, 85%, 90%, 95%, 97.5%, 99%, or 100%; a guide or RNA or sgRNA can be about or more than about 5, 10, 11, 12, 13, 14, 15, 16, 17, 18, 19, 20, 21, 22, 23, 24, 25, 26, 27, 28, 29, 30, 35, 40, 45, 50, 75, or more nucleotides in length; or guide or RNA or sgRNA can be less than about 75, 50, 45, 40, 35, 30, 25, 20, 15, 12, or fewer nucleotides in length; and advantageously tracr RNA is 30 or 50 nucleotides in length. However, an aspect of the invention is to reduce off-target interactions, e.g., reduce the guide interacting with a target sequence having low complementarity. Indeed, in the examples, it is shown that the invention involves mutations that result in the CRISPR-Cas system being able to distinguish between target and off-target sequences that have greater than 80% to about 95% complementarity, e.g., 83%-84% or 88-89% or 94-95% complementarity (for instance, distinguishing between a target having 18 nucleotides from an off-target of 18 nucleotides having 1, 2 or 3 mismatches). Accordingly, in the context of the present invention the degree of complementarity between a guide sequence and its corresponding target sequence is greater than 94.5% or 95% or 95.5% or 96% or 96.5% or 97% or 97.5% or 98% or 98.5% or 99% or 99.5% or 99.9%, or 100%. Off target is less than 100% or 99.9% or 99.5% or 99% or 99% or 98.5% or 98% or 97.5% or 97% or 96.5% or 96% or 95.5% or 95% or 94.5% or 94% or 93% or 92% or 91% or 90% or 89% or 88% or 87% or 86% or 85% or 84% or 83% or 82% or 81% or 80% complementarity between the sequence and the guide, with it advantageous that off target is 100% or 99.9% or 99.5% or 99% or 99% or 98.5% or 98% or 97.5% or 97% or 96.5% or 96% or 95.5% or 95% or 94.5% complementarity between the sequence and the guide.

### Ef1a2 Promotors

[0157] In one aspect, the nucleic acid molecules of the disclosure comprise a Ef1a2 promotor to drive the expression of a protein or gene described herein. In one embodiment, the promotor is Ef1a2 promotor is capable of driving expression in heart, skeletal muscle and neural tissues, such as brain and motor neurons. In one embodiment, the Ef1a2 promotor comprises a sequence at least 70%, at least 71%, at least 72%, at least 73%, at least 74%, at least 75%, at least 76%, at least 77%, at least 78%, at least 79%, 80%, at least 81%, at least 82%, at least 83%, at least 84%, at least 85%, at least 86%, at least 87%, at least 88%, at least 89%, 90%, at least 91%, at least 92%, at least 93%, at least 94%, at least 95%, at least 96%, at least 97%, at least 98%, or at least 99% identical to one of SEQ ID NOs: 820-822. In one embodiment, the Ef1a2 promotor comprises a sequence of one of SEQ ID NOs: 820-822.

### Nucleic Acids

[0158] The isolated nucleic acid sequences of the disclosure can be obtained using any of the many recombinant methods known in the art, such as, for example by screening libraries from cells expressing the gene, by deriving the gene from a vector known to include the same, or by isolating directly from cells and tissues containing the same, using standard techniques. Alternatively, the gene of interest can be produced synthetically, rather than cloned.

[0159] The isolated nucleic acid may comprise any type of nucleic acid, including, but not limited to DNA and RNA. For example, in one embodiment, the composition comprises an isolated DNA molecule, including for example, an isolated cDNA molecule, encoding a protein of the disclosure. In one embodiment, the composition comprises an isolated RNA molecule encoding a fusion of the disclosure, or a functional fragment thereof.

[0160] The nucleic acid molecules of the present invention can be modified to improve stability in serum or in growth medium for cell cultures. Modifications can be added to enhance stability, functionality, and/or specificity and to minimize immunostimulatory properties of the nucleic acid molecule of the invention. For example, in order to enhance the stability, the 3′-residues may be stabilized against degradation, e.g., they may be selected such that they consist of purine nucleotides, particularly adenosine or guanosine nucleotides. Alternatively, substitution of pyrimidine nucleotides by modified analogues, e.g., substitution of uridine by 2′-deoxythymidine is tolerated and does not affect function of the molecule.

[0161] In one embodiment of the present invention the nucleic acid molecule may contain at least one modified nucleotide analogue. For example, the ends may be stabilized by incorporating modified nucleotide analogues.

[0162] Non-limiting examples of nucleotide analogues include sugar- and/or backbone-modified ribonucleotides (i.e., include modifications to the phosphate-sugar backbone). For example, the phosphodiester linkages of natural RNA may be modified to include at least one of a nitrogen or sulfur heteroatom. In exemplary backbone-modified ribonucleotides the phosphoester group connecting to adjacent ribonucleotides is replaced by a modified group, e.g., of phosphothioate group. In exemplary sugar-modified ribonucleotides, the 2′ OH-group is replaced by a group selected from H, OR, R, halo, SH, SR, NH₂, NHR, NR₂ or ON, wherein R is C₁-C₆ alkyl, alkenyl or alkynyl and halo is F, Cl, Br or I.

[0163] Other examples of modifications are nucleobase-modified ribonucleotides, i.e., ribonucleotides, containing at least one non-naturally occurring nucleobase instead of a naturally occurring nucleobase. Bases may be modified to block the activity of adenosine deaminase. Exemplary modified nucleobases include, but are not limited to, uridine and/or cytidine modified at the 5-position, e.g., 5-(2-amino)propyl uridine, 5-bromo uridine; adenosine and/or guanosines modified at the 8 position, e.g., 8-bromo guanosine; deaza nucleotides, e.g., 7-deaza-adenosine; O- and N-alkylated nucleotides, e.g., N6-methyl adenosine are suitable. It should be noted that the above modifications may be combined.

[0164] In some instances, the nucleic acid molecule comprises at least one of the following chemical modifications: 2′-H, 2′-O-methyl, or 2′-OH modification of one or more nucleotides. In certain embodiments, a nucleic acid molecule of the invention can have enhanced resistance to nucleases. For increased nuclease resistance, a nucleic acid molecule, can include, for example, 2′-modified ribose units and/or phosphorothioate linkages. For example, the 2′ hydroxyl group (OH) can be modified or replaced with a number of different “oxy” or “deoxy” substituents. For increased nuclease resistance the nucleic acid molecules of the invention can include 2′-O-methyl, 2′-fluorine, 2′-O-methoxyethyl, 2′-O-aminopropyl, 2′-amino, and/or phosphorothioate linkages. Inclusion of locked nucleic acids (LNA), ethylene nucleic acids (ENA), e.g., 2′-4′-ethylene-bridged nucleic acids, and certain nucleobase modifications such as 2-amino-A, 2-thio (e.g., 2-thio-U), G-clamp modifications, can also increase binding affinity to a target.

[0165] In one embodiment, the nucleic acid molecule includes a 2′-modified nucleotide, e.g., a 2′-deoxy, 2′-deoxy-2′-fluoro, 2′-O-methyl, 2′-O-methoxyethyl (2′-O-MOE), 2′-O-aminopropyl (2′-O-AP), 2′-O-dimethylaminoethyl (2′-O-DMAOE), 2′-O-dimethylaminopropyl (2′-O-DMAP), 2′-O-dimethylaminoethyloxyethyl (2′-O-DMAEOE), or 2′-O—N-methylacetamido (2′-O-NMA). In one embodiment, the nucleic acid molecule includes at least one 2′-O-methyl-modified nucleotide, and in some embodiments, all of the nucleotides of the nucleic acid molecule include a 2′-O-methyl modification.

[0166] In certain embodiments, the nucleic acid molecule of the invention has one or more of the following properties:

[0167] Nucleic acid agents discussed herein include otherwise unmodified RNA and DNA as well as RNA and DNA that have been modified, e.g., to improve efficacy, and polymers of nucleoside surrogates. Unmodified RNA refers to a molecule in which the components of the nucleic acid, namely sugars, bases, and phosphate moieties, are the same or essentially the same as that which occur in nature, or as occur naturally in the human body. The art has referred to rare or unusual, but naturally occurring, RNAs as modified RNAs, see, e.g., Limbach et al. (Nucleic Acids Res., 1994, 22:2183-2196). Such rare or unusual RNAs, often termed modified RNAs, are typically the result of a post-transcriptional modification and are within the term unmodified RNA as used herein. Modified RNA, as used herein, refers to a molecule in which one or more of the components of the nucleic acid, namely sugars, bases, and phosphate moieties, are different from that which occur in nature, or different from that which occurs in the human body. While they are referred to as “modified RNAs” they will of course, because of the modification, include molecules that are not, strictly speaking, RNAs. Nucleoside surrogates are molecules in which the ribophosphate backbone is replaced with a non-ribophosphate construct that allows the bases to be presented in the correct spatial relationship such that hybridization is substantially similar to what is seen with a ribophosphate backbone, e.g., non-charged mimics of the ribophosphate backbone.

[0168] Modifications of the nucleic acid of the invention may be present at one or more of, a phosphate group, a sugar group, backbone, N-terminus, C-terminus, or nucleobase.

[0169] The present invention also includes a vector in which the isolated nucleic acid of the present invention is inserted. The art is replete with suitable vectors that are useful in the present invention.

[0170] In brief summary, the expression of natural or synthetic nucleic acids encoding a protein of the disclosure is typically achieved by operably linking a nucleic acid encoding the protein of the disclosure or portions thereof to a promoter, and incorporating the construct into an expression vector. The vectors to be used are suitable for replication and, optionally, integration in eukaryotic cells. Typical vectors contain transcription and translation terminators, initiation sequences, and promoters useful for regulation of the expression of the desired nucleic acid sequence.

[0171] The vectors of the present invention may also be used for nucleic acid immunization and gene therapy, using standard gene delivery protocols. Methods for gene delivery are known in the art. See, e.g., U.S. Pat. Nos. 5,399,346, 5,580,859, 5,589,466, incorporated by reference herein in their entireties. In another embodiment, the invention provides a gene therapy vector.

[0172] The isolated nucleic acid of the invention can be cloned into a number of types of vectors. For example, the nucleic acid can be cloned into a vector including, but not limited to a plasmid, a phagemid, a phage derivative, an animal virus, and a cosmid. Vectors of particular interest include expression vectors, replication vectors, probe generation vectors, and sequencing vectors.

[0173] Further, the vector may be provided to a cell in the form of a viral vector. Viral vector technology is well known in the art and is described, for example, in Sambrook et al. (2012, Molecular Cloning: A Laboratory Manual, Cold Spring Harbor Laboratory, New York), and in other virology and molecular biology manuals. Viruses, which are useful as vectors include, but are not limited to, retroviruses, adenoviruses, adeno-associated viruses, herpes viruses, and lentiviruses. In general, a suitable vector contains an origin of replication functional in at least one organism, a promoter sequence, convenient restriction endonuclease sites, and one or more selectable markers, (e.g., WO 01/96584; WO 01/29058; and U.S. Pat. No. 6,326,193).

[0174] In one embodiment, the nucleic acid encoding one or more fusion protein of the present invention comprises a nucleic acid sequence at least 70%, at least 71%, at least 72%, at least 73%, at least 74%, at least 75%, at least 76%, at least 77%, at least 78%, at least 79%, at least 80%, at least 81%, at least 82%, at least 83%, at least 84%, at least 85%, at least 86%, at least 87%, at least 88%, at least 89%, at least 90%, at least 91%, at least 92%, at least 93%, at least 94%, at least 95%, at least 96%, at least 97%, at least 98%, or at least 99% identical to SEQ ID NO: 824, linked at its 3′ end to a nucleic acid sequence encoding an RNase, as described above. In one embodiment, the nucleic acid encoding one or more fusion protein comprises a nucleic acid sequence of SEQ ID NO: 824, linked at its 3′ end to a nucleic acid sequence encoding an RNase.

[0175] In one embodiment, the nucleic acid encoding one or more fusion protein of the present invention comprises a nucleic acid sequence at least 70%, at least 71%, at least 72%, at least 73%, at least 74%, at least 75%, at least 76%, at least 77%, at least 78%, at least 79%, at least 80%, at least 81%, at least 82%, at least 83%, at least 84%, at least 85%, at least 86%, at least 87%, at least 88%, at least 89%, at least 90%, at least 91%, at least 92%, at least 93%, at least 94%, at least 95%, at least 96%, at least 97%, at least 98%, or at least 99% identical to SEQ ID NO: 825, linked at its 5′ end to a nucleic acid sequence encoding a first RNase, and linked at its 3′ end to a nucleic acid sequence encoding a second RNase. In one embodiment, the nucleic acid encoding one or more fusion protein comprises a nucleic acid sequence of SEQ ID NO: 825, linked at its 5′ end to a nucleic acid sequence encoding a first RNase, and linked at its 3′ end to a nucleic acid sequence encoding a second RNase.

### Nucleic Acids Encoding Proteins for Trans-Splicing of RNA Molecules

[0176] In some embodiments, the present invention relates to nucleic acids encoding novel fusions of editing proteins for trans-splicing RNA molecules in cells or in vitro. In one embodiment, the present invention comprises a composition comprising one or more nucleic acid encoding one or more novel fusion of an editing protein, as described herein, one or more targeting nucleic acid, as described herein, and one or more RNA molecule. In some embodiments, said one or more RNA molecule comprises a single RNA molecule. In some embodiments, said one or more RNA molecule comprises at least two RNA molecules. In one embodiment, the composition further comprises a RtcB ligase or a nucleic acid encoding RtcB ligase. Exemplary RtcB ligases and corresponding nucleic acid sequences encoding said RtcB ligases can be found in International Application No. PCT/US2021/016885 (incorporated by reference herein in its entirety).

### Delivery Systems and Methods

[0177] In one aspect, the invention relates to the development of novel lentiviral packaging and delivery systems. The lentiviral particle delivers the viral enzymes as proteins. In this fashion, lentiviral enzymes are short lived, thus limiting the potential for off-target editing due to long term expression though the entire life of the cell. The incorporation of editing components, or traditional CRISPR-Cas editing components as proteins in lentiviral particles is advantageous, given that their required activity is only required for a short period of time. Thus, in one embodiment, the invention provides a lentiviral delivery system and methods of delivering the compositions of the invention, editing genetic material, and nucleic acid delivery using lentiviral delivery systems.

[0178] In one embodiment, the delivery system comprises (1) a packaging plasmid (2) a transfer plasmid, and (3) an envelope plasmid. In one embodiment, the delivery system comprises (1) a packaging plasmid (2) an envelope plasmid, and (3) a VPR plasmid. In one embodiment, the packaging plasmid comprises a nucleic acid sequence encoding a gag-pol polyprotein. In one embodiment, the gag-pol polyprotein comprises catalytically dead integrase. In one embodiment, the gag-pol polyprotein comprises a mutation selected from D116N and D64V. In one embodiment, the transfer plasmid comprises a nucleic acid sequence encoding a crRNA sequence and Cas protein of the invention

[0179] In one embodiment, the envelope plasmid comprises a nucleic acid sequence encoding an envelope protein. In one embodiment, the envelope plasmid comprises a nucleic acid sequence encoding an HIV envelope protein. In one embodiment, the envelope plasmid comprises a nucleic acid sequence encoding a vesicular stomatitis virus g-protein (VSV-g) envelope protein. In one embodiment, the envelope protein can be selected based on the desired cell type.

[0180] In one embodiment, the VPR plasmid comprises a nucleic acid sequence encoding a fusion protein comprising VPR, a Cas protein, and RNase protein. In one embodiment, the VPR plasmid comprises a nucleic acid sequence encoding a fusion protein comprising VPR, a Cas protein, a RNase protein and an NLS. In one embodiment, the VPR plasmid comprises a nucleic acid sequence encoding a fusion protein comprising VPR, a Cas protein, a RNase protein and an NES. In one embodiment, the fusion protein comprises a protease cleavage site between VPR and the Cas protein, and RNase protein. In one embodiment, the VPR plasmid packaging plasmid further comprises a sequence encoding a targeting nucleic acid sequence.

[0181] In one embodiment, the packaging plasmid, transfer plasmid, envelope plasmid, and VPR plasmid are introduced into a cell. In one embodiment, the cell transcribes and translates the nucleic acid sequence encoding the gag-pol protein to produce the gag-pol polyprotein. In one embodiment, the cell transcribes and translates the nucleic acid sequence encoding the envelope protein to produce the envelope protein. In one embodiment, the cell transcribes and translates the fusion protein to produce the VPR-fusion protein. In one embodiment, the cell transcribes the nucleic acid sequence encoding the guide RNA. In one embodiment, the transcribed transfer plasmid and gag-pol proteins are packaged into a lentiviral vector. In one embodiment, the lentiviral vectors are collected from the cell media. In one embodiment, the viral particles transduce a target cell, wherein the transcribed the crRNA and Cas protein are cleaved and the translated thereby generating the Cas protein and crRNA, wherein the crRNA binds to the Cas protein and directs it to an RNA having a sequence substantially complementary to the crRNA sequence.

[0182] In one embodiment, the gag-pol protein, envelope polyprotein, and VPR-fusion protein, which is bound to the guide RNA, are packaged into a viral particle. In one embodiment, the viral particles are collected from the cell media. In one embodiment, VPR is cleaved from the fusion protein in the viral particle via the protease site to provide a Cas-fusion protein. In one embodiment, the viral particles transduce a target cell, wherein the guide RNA binds a target region of an RNA thereby targeting the Cas fusion protein.

[0183] Further, a number of additional viral based systems have been developed for gene transfer into mammalian cells. For example, retroviruses provide a convenient platform for gene delivery systems. A selected gene can be inserted into a vector and packaged in retroviral particles using techniques known in the art. The recombinant virus can then be isolated and delivered to cells of the subject either in vivo or ex vivo. A number of retroviral systems are known in the art. In some embodiments, adenovirus vectors are used. A number of adenovirus vectors are known in the art. In one embodiment, lentivirus vectors are used.

[0184] For example, vectors derived from retroviruses such as the lentivirus are suitable tools to achieve long-term gene transfer since they allow long-term, stable integration of a transgene and its propagation in daughter cells. Lentiviral vectors have the added advantage over vectors derived from onco-retroviruses such as murine leukemia viruses in that they can transduce non-proliferating cells, such as hepatocytes. They also have the added advantage of low immunogenicity.

[0185] In one embodiment, the composition includes a vector derived from an adeno-associated virus (AAV). The term “AAV vector” means a vector derived from an adeno-associated virus serotype, including without limitation, AAV-1, AAV-2, AAV-3, AAV-4, AAV-5, AAV-6, AAV-7, AAV-8, and AAV-9. AAV vectors have become powerful gene delivery tools for the treatment of various disorders. AAV vectors possess a number of features that render them ideally suited for gene therapy, including a lack of pathogenicity, minimal immunogenicity, and the ability to transduce postmitotic cells in a stable and efficient manner. Expression of a particular gene contained within an AAV vector can be specifically targeted to one or more types of cells by choosing the appropriate combination of AAV serotype, promoter, and delivery method.

[0186] AAV vectors can have one or more of the AAV wild-type genes deleted in whole or part, preferably the rep and/or cap genes, but retain functional flanking ITR sequences. Despite the high degree of homology, the different serotypes have tropisms for different tissues. The receptor for AAV1 is unknown; however, AAV1 is known to transduce skeletal and cardiac muscle more efficiently than AAV2. Since most of the studies have been done with pseudotyped vectors in which the vector DNA flanked with AAV2 ITR is packaged into capsids of alternate serotypes, it is clear that the biological differences are related to the capsid rather than to the genomes. Recent evidence indicates that DNA expression cassettes packaged in AAV 1 capsids are at least 1 log more efficient at transducing cardiomyocytes than those packaged in AAV2 capsids. In one embodiment, the viral delivery system is an adeno-associated viral delivery system. The adeno-associated virus can be of serotype 1 (AAV 1), serotype 2 (AAV2), serotype 3 (AAV3), serotype 4 (AAV4), serotype 5 (AAV5), serotype 6 (AAV6), serotype 7 (AAV7), serotype 8 (AAV8), or serotype 9 (AAV9).

[0187] Desirable AAV fragments for assembly into vectors include the cap proteins, including the vp1, vp2, vp3 and hypervariable regions, the rep proteins, including rep 78, rep 68, rep 52, and rep 40, and the sequences encoding these proteins. These fragments may be readily utilized in a variety of vector systems and host cells. Such fragments may be used alone, in combination with other AAV serotype sequences or fragments, or in combination with elements from other AAV or non-AAV viral sequences. As used herein, artificial AAV serotypes include, without limitation, AAV with a non-naturally occurring capsid protein. Such an artificial capsid may be generated by any suitable technique, using a selected AAV sequence (e.g., a fragment of a vp1 capsid protein) in combination with heterologous sequences which may be obtained from a different selected AAV serotype, non-contiguous portions of the same AAV serotype, from a non-AAV viral source, or from a non-viral source. An artificial AAV serotype may be, without limitation, a chimeric AAV capsid, a recombinant AAV capsid, or a “humanized” AAV capsid. Thus exemplary AAVs, or artificial AAVs, suitable for expression of one or more proteins, include AAV2/8 (see U.S. Pat. No. 7,282,199), AAV2/5 (available from the National Institutes of Health), AAV2/9 (International Patent Publication No. WO2005/033321), AAV2/6 (U.S. Pat. No. 6,156,303), and AAVrh8 (International Patent Publication No. WO2003/042397), among others.

[0188] In certain embodiments, the vector also includes conventional control elements which are operably linked to the transgene in a manner which permits its transcription, translation and/or expression in a cell transfected with the plasmid vector or infected with the virus produced by the invention. As used herein, “operably linked” sequences include both expression control sequences that are contiguous with the gene of interest and expression control sequences that act in trans or at a distance to control the gene of interest. Expression control sequences include appropriate transcription initiation, termination, promoter and enhancer sequences; efficient RNA processing signals such as splicing and polyadenylation (polyA) signals; sequences that stabilize cytoplasmic mRNA; sequences that enhance translation efficiency (i.e., Kozak consensus sequence); sequences that enhance protein stability; and when desired, sequences that enhance secretion of the encoded product. A great number of expression control sequences, including promoters which are native, constitutive, inducible and/or tissue-specific, are known in the art and may be utilized.

[0189] Additional promoter elements, e.g., enhancers, regulate the frequency of transcriptional initiation. Typically, these are located in the region 30-110 bp upstream of the start site, although a number of promoters have recently been shown to contain functional elements downstream of the start site as well. The spacing between promoter elements frequently is flexible, so that promoter function is preserved when elements are inverted or moved relative to one another. In the thymidine kinase (tk) promoter, the spacing between promoter elements can be increased to 50 bp apart before activity begins to decline. Depending on the promoter, it appears that individual elements can function either cooperatively or independently to activate transcription.

[0190] One example of a suitable promoter is the immediate early cytomegalovirus (CMV) promoter sequence. This promoter sequence is a strong constitutive promoter sequence capable of driving high levels of expression of any polynucleotide sequence operatively linked thereto. Another example of a suitable promoter is Elongation Growth Factor-1α (EF-1α). However, other constitutive promoter sequences may also be used, including, but not limited to the simian virus 40 (SV40) early promoter, mouse mammary tumor virus (MMTV), human immunodeficiency virus (HIV) long terminal repeat (LTR) promoter, MoMuLV promoter, an avian leukemia virus promoter, an Epstein-Barr virus immediate early promoter, a Rous sarcoma virus promoter, as well as human gene promoters such as, but not limited to, the actin promoter, the myosin promoter, the hemoglobin promoter, and the creatine kinase promoter. Further, the invention should not be limited to the use of constitutive promoters. Inducible promoters are also contemplated as part of the invention. The use of an inducible promoter provides a molecular switch capable of turning on expression of the polynucleotide sequence which it is operatively linked when such expression is desired, or turning off the expression when expression is not desired. Examples of inducible promoters include, but are not limited to a metallothionine promoter, a glucocorticoid promoter, a progesterone promoter, and a tetracycline promoter.

[0191] Enhancer sequences found on a vector also regulates expression of the gene contained therein. Typically, enhancers are bound with protein factors to enhance the transcription of a gene. Enhancers may be located upstream or downstream of the gene it regulates. Enhancers may also be tissue-specific to enhance transcription in a specific cell or tissue type. In one embodiment, the vector of the present invention comprises one or more enhancers to boost transcription of the gene present within the vector.

[0192] In order to assess the expression of a fusion protein of the invention, the expression vector to be introduced into a cell can also contain either a selectable marker gene or a reporter gene or both to facilitate identification and selection of expressing cells from the population of cells sought to be transfected or infected through viral vectors. In other aspects, the selectable marker may be carried on a separate piece of DNA and used in a co-transfection procedure. Both selectable markers and reporter genes may be flanked with appropriate regulatory sequences to enable expression in the host cells. Useful selectable markers include, for example, antibiotic-resistance genes, such as neo and the like.

[0193] Reporter genes are used for identifying potentially transfected cells and for evaluating the functionality of regulatory sequences. In general, a reporter gene is a gene that is not present in or expressed by the recipient organism or tissue and that encodes a polypeptide whose expression is manifested by some easily detectable property, e.g., enzymatic activity. Expression of the reporter gene is assayed at a suitable time after the DNA has been introduced into the recipient cells. Suitable reporter genes may include genes encoding luciferase, beta-galactosidase, chloramphenicol acetyl transferase, secreted alkaline phosphatase, or the green fluorescent protein gene (e.g., Ui-Tei et al., 2000 FEBS Letters 479: 79-82). Suitable expression systems are well known and may be prepared using known techniques or obtained commercially. In general, the construct with the minimal 5′ flanking region showing the highest level of expression of reporter gene is identified as the promoter. Such promoter regions may be linked to a reporter gene and used to evaluate agents for the ability to modulate promoter-driven transcription.

[0194] Methods of introducing and expressing genes into a cell are known in the art. In the context of an expression vector, the vector can be readily introduced into a host cell, e.g., mammalian, bacterial, yeast, or insect cell by any method in the art. For example, the expression vector can be transferred into a host cell by physical, chemical, or biological means.

[0195] Physical methods for introducing a polynucleotide into a host cell include calcium phosphate precipitation, lipofection, particle bombardment, microinjection, electroporation, and the like. Methods for producing cells comprising vectors and/or exogenous nucleic acids are well-known in the art. See, for example, Sambrook et al. (2012, Molecular Cloning: A Laboratory Manual, Cold Spring Harbor Laboratory, New York). An exemplary method for the introduction of a polynucleotide into a host cell is calcium phosphate transfection.

[0196] Biological methods for introducing a polynucleotide of interest into a host cell include the use of DNA and RNA vectors. Viral vectors, and especially retroviral vectors, have become the most widely used method for inserting genes into mammalian, e.g., human cells. Other viral vectors can be derived from lentivirus, poxviruses, herpes simplex virus I, adenoviruses and adeno-associated viruses, and the like. See, for example, U.S. Pat. Nos. 5,350,674 and 5,585,362.

[0197] Chemical means for introducing a polynucleotide into a host cell include colloidal dispersion systems, such as macromolecule complexes, nanocapsules, microspheres, beads, and lipid-based systems including oil-in-water emulsions, micelles, mixed micelles, and liposomes. An exemplary colloidal system for use as a delivery vehicle in vitro and in vivo is a liposome (e.g., an artificial membrane vesicle).

[0198] In the case where a non-viral delivery system is utilized, an exemplary delivery vehicle is a liposome. The use of lipid formulations is contemplated for the introduction of the nucleic acids into a host cell (in vitro, ex vivo or in vivo). In another aspect, the nucleic acid may be associated with a lipid. The nucleic acid associated with a lipid may be encapsulated in the aqueous interior of a liposome, interspersed within the lipid bilayer of a liposome, attached to a liposome via a linking molecule that is associated with both the liposome and the oligonucleotide, entrapped in a liposome, complexed with a liposome, dispersed in a solution containing a lipid, mixed with a lipid, combined with a lipid, contained as a suspension in a lipid, contained or complexed with a micelle, or otherwise associated with a lipid. Lipid, lipid/DNA or lipid/expression vector associated compositions are not limited to any particular structure in solution. For example, they may be present in a bilayer structure, as micelles, or with a “collapsed” structure. They may also simply be interspersed in a solution, possibly forming aggregates that are not uniform in size or shape. Lipids are fatty substances which may be naturally occurring or synthetic lipids. For example, lipids include the fatty droplets that naturally occur in the cytoplasm as well as the class of compounds which contain long-chain aliphatic hydrocarbons and their derivatives, such as fatty acids, alcohols, amines, amino alcohols, and aldehydes.

[0199] Lipids suitable for use can be obtained from commercial sources. For example, dimyristyl phosphatidylcholine (“DMPC”) can be obtained from Sigma, St. Louis, MO; dicetyl phosphate (“DCP”) can be obtained from K & K Laboratories (Plainview, NY); cholesterol (“Choi”) can be obtained from Calbiochem-Behring; dimyristyl phosphatidylglycerol (“DMPG”) and other lipids may be obtained from Avanti Polar Lipids, Inc. (Birmingham, AL). Stock solutions of lipids in chloroform or chloroform/methanol can be stored at about −20° C. Chloroform is used as the only solvent since it is more readily evaporated than methanol. “Liposome” is a generic term encompassing a variety of single and multilamellar lipid vehicles formed by the generation of enclosed lipid bilayers or aggregates. Liposomes can be characterized as having vesicular structures with a phospholipid bilayer membrane and an inner aqueous medium. Multilamellar liposomes have multiple lipid layers separated by aqueous medium. They form spontaneously when phospholipids are suspended in an excess of aqueous solution. The lipid components undergo self-rearrangement before the formation of closed structures and entrap water and dissolved solutes between the lipid bilayers (Ghosh et al., 1991 Glycobiology 5: 505-10). However, compositions that have different structures in solution than the normal vesicular structure are also encompassed. For example, the lipids may assume a micellar structure or merely exist as nonuniform aggregates of lipid molecules. Also contemplated are lipofectamine-nucleic acid complexes.

[0200] Regardless of the method used to introduce exogenous nucleic acids into a host cell, in order to confirm the presence of the recombinant DNA sequence in the host cell, a variety of assays may be performed. Such assays include, for example, “molecular biological” assays well known to those of skill in the art, such as Southern and Northern blotting, RT-PCR and PCR; “biochemical” assays, such as detecting the presence or absence of a particular peptide, e.g., by immunological means (ELISAs and Western blots) or by assays described herein to identify agents falling within the scope of the invention.

[0201] Nanoparticles

[0202] In some embodiments, the present disclosure provides fusion proteins, nucleic acids, or a combination thereof of any of the preceding paragraphs formulated in a nanoparticle (e.g., a lipid nanoparticle).

[0203] In some embodiments, the fusion proteins, nucleic acids, or a combination thereof is formulated in a lipid nanoparticle. In some embodiments, the fusion proteins, nucleic acids, or a combination thereof is formulated in a lipid-polycation complex, referred to as a cationic lipid nanoparticle. As a non-limiting example, the polycation may include a cationic peptide or a polypeptide such as, but not limited to, polylysine, polyornithine and/or polyarginine. In some embodiments, the fusion proteins, nucleic acids, or a combination thereof is formulated in a lipid nanoparticle that includes a non-cationic lipid such as, but not limited to, cholesterol or dioleoyl phosphatidyl-ethanolamine (DOPE). In some embodiments, the lipid nanoparticle comprises at least one ionizable cationic lipid, at least one non-cationic lipid, at least one sterol, and/or at least one polyethylene glycol (PEG)-modified lipid.

[0204] A lipid nanoparticle formulation may be influenced by, but not limited to, the selection of the cationic lipid component, the degree of cationic lipid saturation, the nature of the PEGylation, ratio of all components and biophysical parameters such as size. In one example by Semple et al. (Nature Biotech. 2010 28:172-176), the lipid nanoparticle formulation is composed of 57.1% cationic lipid, 7.1% dipalmitoylphosphatidylcholine, 34.3% cholesterol, and 1.4% PEG-c-DMA. As another example, changing the composition of the cationic lipid can more effectively deliver siRNA to various antigen presenting cells (Basha et al. Mol Ther. 2011 19:2186-2200).

[0205] In some embodiments, lipid nanoparticle formulations may comprise 35 to 45% cationic lipid, 40% to 50% cationic lipid, 50% to 60% cationic lipid and/or 55% to 65% cationic lipid. In some embodiments, the ratio of lipid to RNA (e.g., mRNA) in lipid nanoparticles may be 5:1 to 20:1, 10:1 to 25:1, 15:1 to 30:1 and/or at least 30:1.

[0206] In some embodiments, the ratio of PEG in the lipid nanoparticle formulations may be increased or decreased and/or the carbon chain length of the PEG lipid may be modified from C14 to C18 to alter the pharmacokinetics and/or biodistribution of the lipid nanoparticle formulations. As a non-limiting example, lipid nanoparticle formulations may contain 0.5% to 3.0%, 1.0% to 3.5%, 1.5% to 4.0%, 2.0% to 4.5%, 2.5% to 5.0% and/or 3.0% to 6.0% of the lipid molar ratio of PEG-c-DOMG (R-3-[(ω-methoxy-poly(ethyleneglycol)2000)carbamoyl)]-1,2-dimyristyloxypropyl-3-amine) (also referred to herein as PEG-DOMG) as compared to the cationic lipid, DSPC and cholesterol. In some embodiments, the PEG-c-DOMG may be replaced with a PEG lipid such as, but not limited to, PEG-DSG (1,2-Distearoyl-sn-glycerol, methoxypolyethylene glycol), PEG-DMG (1,2-Dimyristoyl-sn-glycerol) and/or PEG-DPG (1,2-Dipalmitoyl-sn-glycerol, methoxypolyethylene glycol). The cationic lipid may be selected from any lipid known in the art such as, but not limited to, DLin-MC3-DMA, DLin-DMA, C12-200 and DLin-KC2-DMA.

[0207] In some embodiments, the fusion proteins, nucleic acids, or a combination thereof is formulated as a nanoparticle that comprises at least one lipid selected from, but not limited to, DLin-DMA, DLin-K-DMA, 98N12-5, C12-200, DLin-MC3-DMA, DLin-KC2-DMA, DODMA, PLGA, PEG, PEG-DMG, PEGylated lipids and amino alcohol lipids. In some embodiments, the lipid may be a cationic lipid such as, but not limited to, DLin-DMA, DLin-D-DMA, DLin-MC3-DMA, DLin-KC2-DMA, DODMA and amino alcohol lipids. The amino alcohol cationic lipid may be the lipids described in and/or made by the methods described in U.S. Patent Publication No. US20130150625, herein incorporated by reference in its entirety. As a non-limiting example, the cationic lipid may be 2-amino-3-[(9Z,12Z)-octadeca-9,12-dien-1-yloxy]-2-{[(9Z,2Z)-octadeca-9,12-dien-1-yloxy]methyl}propan-1-ol (Compound 1 in US20130150625); 2-amino-3-[(9Z)-octadec-9-en-1-yloxy]-2{[(9Z)-octadec-9-en-1-yloxy]methyl}propan-1-ol (Compound 2 in US20130150625); 2-amino-3-[(9Z,12Z)-octadeca-9,12-dien-1-yloxy]-2-[(octyloxy)methyl]propan-1-ol (Compound 3 in US20130150625); and 2-(dimethylamino)-3-[(9Z,12Z)-octadeca-9,12-dien-1-yloxy]-2-{[(9Z,12Z)-octadeca-9,12-dien-1-yloxy]methyl}propan-lol (Compound 4 in US20130150625); or any pharmaceutically acceptable salt or stereoisomer thereof.

[0208] Lipid nanoparticle formulations typically comprise a lipid, in particular, an ionizable cationic lipid, for example, 2,2-dilinoleyl-4-dimethylaminoethyl-[1,3]-dioxolane (DLin-KC2-DMA), dilinoleyl-methyl-4-dimethylaminobutyrate (DLin-MC3-DMA), or di((Z)-non-2-en-1-yl) 9-((4-(dimethylamino)butanoyl)oxy)heptadecanedioate (L319), and further comprise a neutral lipid, a sterol and a molecule capable of reducing particle aggregation, for example a PEG or PEG-modified lipid.

[0209] In some embodiments, a lipid nanoparticle formulation consists essentially of (i) at least one lipid selected from the group consisting of 2,2-dilinoleyl-4-dimethylaminoethyl-[1,3]-dioxolane (DLin-KC2-DMA), dilinoleyl-methyl-4-dimethylaminobutyrate (DLin-MC3-DMA), and di((Z)-non-2-en-1-yl) 9-((4-(dimethylamino)butanoyl)oxy)heptadecanedioate (L319); (ii) a neutral lipid selected from DSPC, DPPC, POPC, DOPE and SM; (iii) a sterol, e.g., cholesterol; and (iv) a PEG-lipid, e.g., PEG-DMG or PEG-cDMA, in a molar ratio of 20-60% cationic lipid:5-25% neutral lipid: 25-55% sterol; 0.5-15% PEG-lipid.

[0210] In some embodiments, a lipid nanoparticle formulation includes 25% to 75% on a molar basis of a cationic lipid selected from 2,2-dilinoleyl-4-dimethylaminoethyl-[1,3]-dioxolane (DLin-KC2-DMA), dilinoleyl-methyl-4-dimethylaminobutyrate (DLin-MC3-DMA), and di((Z)-non-2-en-1-yl) 9-((4-(dimethylamino)butanoyl)oxy)heptadecanedioate (L319), e.g., 35 to 65%, to 65%, 60%, 57.5%, 50% or 40% on a molar basis.

[0211] In some embodiments, a lipid nanoparticle formulation includes 0.5% to 15% on a molar basis of the neutral lipid, e.g., 3 to 12%, 5 to 10% or 15%, 10%, or 7.5% on a molar basis. Examples of neutral lipids include, without limitation, DSPC, POPC, DPPC, DOPE and SM. In some embodiments, the formulation includes 5% to 50% on a molar basis of the sterol (e.g., 15 to 45%, 20 to 40%, 40%, 38.5%, 35%, or 31% on a molar basis. A non-limiting example of a sterol is cholesterol. In some embodiments, a lipid nanoparticle formulation includes 0.5% to 20% on a molar basis of the PEG or PEG-modified lipid (e.g., 0.5 to 10%, 0.5 to 5%, 1.5%, 0.5%, 1.5%, 3.5%, or 5% on a molar basis. In some embodiments, a PEG or PEG modified lipid comprises a PEG molecule of an average molecular weight of 2,000 Da. In some embodiments, a PEG or PEG modified lipid comprises a PEG molecule of an average molecular weight of less than 2,000, for example around 1,500 Da, around 1,000 Da, or around 500 Da. Non-limiting examples of PEG-modified lipids include PEG-distearoyl glycerol (PEG-DMG) (also referred herein as PEG-C14 or C14-PEG), PEG-cDMA (further discussed in Reyes et al. J. Controlled Release, 107, 276-287 (2005) the contents of which are herein incorporated by reference in their entirety).

[0212] In some embodiments, the molar lipid ratio is 50/10/38.5/1.5 (mol % cationic lipid/neutral lipid, e.g., DSPC/Chol/PEG-modified lipid, e.g., PEG-DMG, PEG-DSG or PEG-DPG), 57.2/7.1134.3/1.4 (mol % cationic lipid/neutral lipid, e.g., DPPC/Chol/PEG-modified lipid, e.g., PEG-cDMA), 40/15/40/5 (mol % cationic lipid/neutral lipid, e.g., DSPC/Chol/PEG-modified lipid, e.g., PEG-DMG), 50/10/35/4.5/0.5 (mol % cationic lipid/neutral lipid, e.g., DSPC/Chol/PEG-modified lipid, e.g., PEG-DSG), 50/10/35/5 (cationic lipid/neutral lipid, e.g., DSPC/Chol/PEG-modified lipid, e.g., PEG-DMG), 40/10/40/10 (mol % cationic lipid/neutral lipid, e.g., DSPC/Chol/PEG-modified lipid, e.g., PEG-DMG or PEG-cDMA), 35/15/40/10 (mol % cationic lipid/neutral lipid, e.g., DSPC/Chol/PEG-modified lipid, e.g., PEG-DMG or PEG-CDMA) or 52/13/30/5 (mol % cationic lipid/neutral lipid, e.g., DSPC/Chol/PEG-modified lipid, e.g., PEG-DMG or PEG-cDMA).

[0213] Non-limiting examples of lipid nanoparticle compositions and methods of making them are described, for example, in Semple et al. (2010) Nat. Biotechnol. 28:172-176; Jayarama et al. (2012), Angew. Chem. Int. Ed., Si: 8529-8533; and Maier et al. (2013) Molecular Therapy 21, 1570-1578 (the contents of each of which are incorporated herein by reference in their entirety).

[0214] In some embodiments, lipid nanoparticle formulations may comprise a cationic lipid, a PEG lipid and a structural lipid and optionally comprise a non-cationic lipid. As a non-limiting example, a lipid nanoparticle may comprise 40-60% of cationic lipid, 5-15% of a non-cationic lipid, 1-2% of a PEG lipid and 30-50% of a structural lipid. As another non-limiting example, the lipid nanoparticle may comprise 50% cationic lipid, 10% non-cationic lipid, 1.5% PEG lipid and 38.5% structural lipid. As yet another non-limiting example, a lipid nanoparticle may comprise 55% cationic lipid, 10% non-cationic lipid, 2.5% PEG lipid and 32.5% structural lipid. In some embodiments, the cationic lipid may be any cationic lipid described herein such as, but not limited to, DLin-KC2-DMA, DLin-MC3-DMA and L319.

[0215] In some embodiments, the lipid nanoparticle formulations described herein may be 4 component lipid nanoparticles. The lipid nanoparticle may comprise a cationic lipid, a non-cationic lipid, a PEG lipid and a structural lipid. As a non-limiting example, the lipid nanoparticle may comprise 40-60% of cationic lipid, 5-15% of a non-cationic lipid, 1-2% of a PEG lipid and 30-50% of a structural lipid. As another non-limiting example, the lipid nanoparticle may comprise 50% cationic lipid, 10% non-cationic lipid, 1.5% PEG lipid and 38.5% structural lipid. As yet another non-limiting example, the lipid nanoparticle may comprise 55% cationic lipid, 10% non-cationic lipid, 2.5% PEG lipid and 32.5% structural lipid. In some embodiments, the cationic lipid may be any cationic lipid described herein such as, but not limited to, DLin-KC2-DMA, DLin-MC3-DMA and L319.

[0216] In some embodiments, the lipid nanoparticle formulations described herein may comprise a cationic lipid, a non-cationic lipid, a PEG lipid and a structural lipid. As a non-limiting example, the lipid nanoparticle comprise 50% of the cationic lipid DLin-KC2-DMA, 10% of the non-cationic lipid DSPC, 1.5% of the PEG lipid PEG-DOMG and 38.5% of the structural lipid cholesterol. As a non-limiting example, the lipid nanoparticle comprise 50% of the cationic lipid DLin-MC3-DMA, 10% of the non-cationic lipid DSPC, 1.5% of the PEG lipid PEG-DOMG and 38.5% of the structural lipid cholesterol. As a non-limiting example, the lipid nanoparticle comprise 50% of the cationic lipid DLin-MC3-DMA, 10% of the non-cationic lipid DSPC, 1.5% of the PEG lipid PEG-DMG and 38.5% of the structural lipid cholesterol. As yet another non-limiting example, the lipid nanoparticle comprise 55% of the cationic lipid L319, 10% of the non-cationic lipid DSPC, 2.5% of the PEG lipid PEG-DMG and 32.5% of the structural lipid cholesterol.

[0217] In some embodiments, a nanoparticle (e.g., a lipid nanoparticle) has a mean diameter of 10-500 nm, 20-400 nm, 30-300 nm, 40-200 nm. In some embodiments, a nanoparticle (e.g., a lipid nanoparticle) has a mean diameter of 50-150 nm, 50-200 nm, 80-100 nm or 80-200 nm.

### Systems

[0218] In one aspect, the present invention provides a system for decreasing the number of an RNA transcript in a subject. In one embodiment the system comprises, in one or more vectors, a nucleic acid sequence encoding a fusion protein, wherein the fusion protein comprises a CRISPR-associated (Cas) protein, a RNase protein, and optionally a localization sequence, such as an NLS or NES; and a nucleic acid sequence encoding a CRISPR-Cas system crRNA. In one embodiment, the system further comprises, on the same or different vector, a nucleic acid sequence encoding a second targeting nucleic acid. In one embodiment, the CRISPR-Cas system crRNA substantially hybridizes to a target RNA sequence in the RNA transcript. In one embodiment, the nucleic acid sequence encoding the fusion protein and the nucleic acid sequence encoding a CRISPR-Cas system crRNA are in the same vector. In one embodiment, the nucleic acid sequence encoding the fusion protein and the nucleic acid sequence encoding a CRISPR-Cas system crRNA are in different vectors.

[0219] In one embodiment, the nucleic acid sequence encoding a fusion protein comprises (1) a nucleic acid sequence encoding an amino acid sequence at least 70%, at least 71%, at least 72%, at least 73%, at least 74%, at least 75%, at least 76%, at least 77%, at least 78%, at least 79%, at least 80%, at least 81%, at least 82%, at least 83%, at least 84%, at least 85%, at least 86%, at least 87%, at least 88%, at least 89%, at least 90%, at least 91%, at least 92%, at least 93%, at least 94%, at least 95%, at least 96%, at least 97%, at least 98%, or at least 99% identical to one of SEQ ID NOs: 47-48; (2) a nucleic acid sequence encoding an amino acid sequence at least 70%, at least 71%, at least 72%, at least 73%, at least 74%, at least 75%, at least 76%, at least 77%, at least 78%, at least 79%, at least 80%, at least 81%, at least 82%, at least 83%, at least 84%, at least 85%, at least 86%, at least 87%, at least 88%, at least 89%, at least 90%, at least 91%, at least 92%, at least 93%, at least 94%, at least 95%, at least 96%, at least 97%, at least 98%, or at least 99% identical to one of SEQ ID NOs: 49-89; and (3) a nucleic acid sequence encoding an amino acid sequence at least 70%, at least 71%, at least 72%, at least 73%, at least 74%, at least 75%, at least 76%, at least 77%, at least 78%, at least 79%, at least 80%, at least 81%, at least 82%, at least 83%, at least 84%, at least 85%, at least 86%, at least 87%, at least 88%, at least 89%, at least 90%, at least 91%, at least 92%, at least 93%, at least 94%, at least 95%, at least 96%, at least 97%, at least 98%, or at least 99% identical to one of SEQ ID NOs: 110-730. In one embodiment, the nucleic acid sequence encoding a fusion protein comprises (1) a nucleic acid sequence encoding an amino acid of one of SEQ ID NOs: 47-48; (2) a nucleic acid sequence encoding an amino acid of one of SEQ ID NOs: 49-89; and (3) a nucleic acid sequence encoding an amino acid of one of SEQ ID NOs: 110-730.

[0220] In one embodiment the system comprises, in one or more vectors, a nucleic acid sequence encoding a fusion protein, wherein the fusion protein comprises a CRISPR-associated (Cas) protein, a s-protein, and optionally a localization signal such as an NLS or NES; and a nucleic acid sequence encoding a CRISPR-Cas system crRNA; and a nucleic acid sequence encoding a s-peptide. In one embodiment, the s-peptide further comprises ERT2. In one embodiment, the nucleic acid sequence encoding a s-peptide is on a different vector. In one embodiment, the s-peptide binds to the s-protein of the fusion protein thereby forming a catalytically active RNase. In one embodiment, the CRISPR-Cas system crRNA substantially hybridizes to a target RNA sequence in the RNA transcript. In one embodiment, the nucleic acid sequence encoding the fusion protein and the nucleic acid sequence encoding a CRISPR-Cas system crRNA are in the same vector. In one embodiment, the nucleic acid sequence encoding the fusion protein and the nucleic acid sequence encoding a CRISPR-Cas system crRNA are in different vectors.

[0221] In one embodiment the system comprises, in one or more vectors, a nucleic acid sequence encoding a fusion protein, wherein the fusion protein comprises a CRISPR-associated (Cas) protein, a s-peptide, and optionally a localization sequence, such as an NLS or NES; and a nucleic acid sequence encoding a CRISPR-Cas system crRNA; and a nucleic acid sequence encoding a s-protein. In one embodiment, the s-peptide further comprises ERT2. In one embodiment, the nucleic acid sequence encoding a s-protein is on a different vector. In one embodiment, the s-protein binds to the s-peptide of the fusion protein thereby forming a catalytically active RNase. In one embodiment, the CRISPR-Cas system crRNA substantially hybridizes to a target RNA sequence in the RNA transcript. In one embodiment, the nucleic acid sequence encoding the fusion protein and the nucleic acid sequence encoding a CRISPR-Cas system crRNA are in the same vector. In one embodiment, the nucleic acid sequence encoding the fusion protein and the nucleic acid sequence encoding a CRISPR-Cas system crRNA are in different vectors.

[0222] In one embodiment, the nucleic acid sequence encoding a fusion protein comprises (1) a nucleic acid sequence encoding an amino acid sequence at least 70%, at least 71%, at least 72%, at least 73%, at least 74%, at least 75%, at least 76%, at least 77%, at least 78%, at least 79%, at least 80%, at least 81%, at least 82%, at least 83%, at least 84%, at least 85%, at least 86%, at least 87%, at least 88%, at least 89%, at least 90%, at least 91%, at least 92%, at least 93%, at least 94%, at least 95%, at least 96%, at least 97%, at least 98%, or at least 99% identical to one of SEQ ID NOs: 47-48; (2) a nucleic acid sequence encoding an amino acid sequence at least 70%, at least 71%, at least 72%, at least 73%, at least 74%, at least 75%, at least 76%, at least 77%, at least 78%, at least 79%, at least 80%, at least 81%, at least 82%, at least 83%, at least 84%, at least 85%, at least 86%, at least 87%, at least 88%, at least 89%, at least 90%, at least 91%, at least 92%, at least 93%, at least 94%, at least 95%, at least 96%, at least 97%, at least 98%, or at least 99% identical to one of SEQ ID NOs: 90, 93, and 96; (3) a nucleic acid sequence encoding an amino acid sequence at least 70%, at least 71%, at least 72%, at least 73%, at least 74%, at least 75%, at least 76%, at least 77%, at least 78%, at least 79%, at least 80%, at least 81%, at least 82%, at least 83%, at least 84%, at least 85%, at least 86%, at least 87%, at least 88%, at least 89%, at least 90%, at least 91%, at least 92%, at least 93%, at least 94%, at least 95%, at least 96%, at least 97%, at least 98%, or at least 99% identical to one of SEQ ID NOs: 83, 84, 86, 87, 89 and 90; and (4) a nucleic acid sequence encoding an amino acid sequence at least 70%, at least 71%, at least 72%, at least 73%, at least 74%, at least 75%, at least 76%, at least 77%, at least 78%, at least 79%, at least 80%, at least 81%, at least 82%, at least 83%, at least 84%, at least 85%, at least 86%, at least 87%, at least 88%, at least 89%, at least 90%, at least 91%, at least 92%, at least 93%, at least 94%, at least 95%, at least 96%, at least 97%, at least 98%, or at least 99% identical to one of SEQ ID NOs: 110-730. In one embodiment, the nucleic acid sequence encoding a fusion protein comprises (1) a nucleic acid sequence encoding an amino acid of one of SEQ ID NOs: 47-48; (2) a nucleic acid sequence encoding an amino acid of one of SEQ ID NOs: 90, 93, and 96; (3) a nucleic acid sequence encoding an amino acid of one of SEQ ID NOs: 83, 84, 86, 87, 89 and 90; and (4) a nucleic acid sequence encoding an amino acid of one of SEQ ID NOs: 110-730.

### Compositions and Formulations

[0223] In one aspect, the present invention provides compositions for decreasing the number of an RNA transcript in a subject. In one embodiment, the composition comprises a fusion protein, wherein the fusion protein comprises a CRISPR-associated (Cas) protein, a RNase protein, and optionally a localization sequence, such as an NLS or NES. In one embodiment, the composition comprises a CRISPR-Cas system crRNA. In one embodiment, the composition a second targeting nucleic acid. In one embodiment, the CRISPR-Cas system crRNA substantially hybridizes to a target RNA sequence in the RNA transcript.

[0224] In one embodiment, the composition comprises a fusion protein comprising (1) an amino acid sequence at least 70%, at least 71%, at least 72%, at least 73%, at least 74%, at least 75%, at least 76%, at least 77%, at least 78%, at least 79%, at least 80%, at least 81%, at least 82%, at least 83%, at least 84%, at least 85%, at least 86%, at least 87%, at least 88%, at least 89%, at least 90%, at least 91%, at least 92%, at least 93%, at least 94%, at least 95%, at least 96%, at least 97%, at least 98%, or at least 99% identical to one of SEQ ID NOs: 47-48; (2) an amino acid sequence at least 70%, at least 71%, at least 72%, at least 73%, at least 74%, at least 75%, at least 76%, at least 77%, at least 78%, at least 79%, at least 80%, at least 81%, at least 82%, at least 83%, at least 84%, at least 85%, at least 86%, at least 87%, at least 88%, at least 89%, at least 90%, at least 91%, at least 92%, at least 93%, at least 94%, at least 95%, at least 96%, at least 97%, at least 98%, or at least 99% identical to one of SEQ ID NOs: 49-89; and (3) an amino acid sequence at least 70%, at least 71%, at least 72%, at least 73%, at least 74%, at least 75%, at least 76%, at least 77%, at least 78%, at least 79%, at least 80%, at least 81%, at least 82%, at least 83%, at least 84%, at least 85%, at least 86%, at least 87%, at least 88%, at least 89%, at least 90%, at least 91%, at least 92%, at least 93%, at least 94%, at least 95%, at least 96%, at least 97%, at least 98%, or at least 99% identical to one of SEQ ID NOs: 110-730. In one embodiment, composition comprises a fusion protein comprising (1) an amino acid of one of SEQ ID NOs: 47-48; (2) amino acid of one of SEQ ID NOs: 49-89; and (3) an amino acid of one of SEQ ID NOs: 110-730.

[0225] In one embodiment, composition comprises a fusion protein, wherein the fusion protein comprises a CRISPR-associated (Cas) protein, a s-protein, and optionally a localization sequence, such as an NLS or NES; a CRISPR-Cas system crRNA; and an s-peptide. In one embodiment, the s-peptide further comprises ERT2. In one embodiment, the s-peptide binds to the s-protein of the fusion protein thereby forming a catalytically active RNase. In one embodiment, the CRISPR-Cas system crRNA substantially hybridizes to a target RNA sequence in the RNA transcript. In one embodiment, the fusion protein and CRISPR-Cas system crRNA are separate from the s-peptide. In one embodiment, the s-peptide is subsequently added to the composition comprising the fusion protein and CRISPR-Cas system crRNA thereby providing inducible catalytic activity.

[0226] In one embodiment, composition comprises a fusion protein, wherein the fusion protein comprises a CRISPR-associated (Cas) protein, a s-peptide, and optionally a localization sequence, such as an NLS or NES; a CRISPR-Cas system crRNA; and an s-protein. In one embodiment, the s-peptide further comprises ERT2. In one embodiment, the s-protein binds to the s-peptide of the fusion protein thereby forming a catalytically active RNase. In one embodiment, the CRISPR-Cas system crRNA substantially hybridizes to a target RNA sequence in the RNA transcript. In one embodiment, the fusion protein and CRISPR-Cas system crRNA are separate from the s-protein. In one embodiment, the s-protein is subsequently added to the composition comprising the fusion protein and CRISPR-Cas system crRNA thereby providing inducible catalytic activity.

[0227] In one embodiment, composition comprises a fusion protein comprising (1) an amino acid sequence at least 70%, at least 71%, at least 72%, at least 73%, at least 74%, at least 75%, at least 76%, at least 77%, at least 78%, at least 79%, at least 80%, at least 81%, at least 82%, at least 83%, at least 84%, at least 85%, at least 86%, at least 87%, at least 88%, at least 89%, at least 90%, at least 91%, at least 92%, at least 93%, at least 94%, at least 95%, at least 96%, at least 97%, at least 98%, or at least 99% identical to one of SEQ ID NOs: 47-48; (2) an amino acid sequence at least 70%, at least 71%, at least 72%, at least 73%, at least 74%, at least 75%, at least 76%, at least 77%, at least 78%, at least 79%, at least 80%, at least 81%, at least 82%, at least 83%, at least 84%, at least 85%, at least 86%, at least 87%, at least 88%, at least 89%, at least 90%, at least 91%, at least 92%, at least 93%, at least 94%, at least 95%, at least 96%, at least 97%, at least 98%, or at least 99% identical to one of SEQ ID NOs: 90, 93, and 96; (3) an amino acid sequence at least 70%, at least 71%, at least 72%, at least 73%, at least 74%, at least 75%, at least 76%, at least 77%, at least 78%, at least 79%, at least 80%, at least 81%, at least 82%, at least 83%, at least 84%, at least 85%, at least 86%, at least 87%, at least 88%, at least 89%, at least 90%, at least 91%, at least 92%, at least 93%, at least 94%, at least 95%, at least 96%, at least 97%, at least 98%, or at least 99% identical to one of SEQ ID NOs: 83, 84, 86, 87, 89 and 90; and (4) an amino acid sequence at least 70%, at least 71%, at least 72%, at least 73%, at least 74%, at least 75%, at least 76%, at least 77%, at least 78%, at least 79%, at least 80%, at least 81%, at least 82%, at least 83%, at least 84%, at least 85%, at least 86%, at least 87%, at least 88%, at least 89%, at least 90%, at least 91%, at least 92%, at least 93%, at least 94%, at least 95%, at least 96%, at least 97%, at least 98%, or at least 99% identical to one of SEQ ID NOs: 110-730. In one embodiment, the composition comprises a fusion protein comprising (1) amino acid of one of SEQ ID NOs: 47-48; (2) an amino acid of one of SEQ ID NOs: 90, 93, and 96; (3) an amino acid of one of SEQ ID NOs: 83, 84, 86, 87, 89 and 90; and (4) an amino acid of one of SEQ ID NOs: 110-730.

[0228] The disclosure also encompasses the use of pharmaceutical compositions of the disclosure to practice the methods of the disclosure. Such a pharmaceutical composition may consist of at least one modulator (e.g., inhibitor or activator) composition of the invention or a salt thereof in a form suitable for administration to a subject, or the pharmaceutical composition may comprise at least one modulator (e.g., inhibitor or activator) composition of the invention or a salt thereof, and one or more pharmaceutically acceptable carriers, one or more additional ingredients, or some combination of these. The compound of the invention may be present in the pharmaceutical composition in the form of a physiologically acceptable salt, such as in combination with a physiologically acceptable cation or anion, as is well known in the art.

[0229] In an embodiment, the pharmaceutical compositions useful for practicing the methods of the invention may be administered to deliver a dose of between 1 ng/kg/day and 100 mg/kg/day. In another embodiment, the pharmaceutical compositions useful for practicing the invention may be administered to deliver a dose of between 1 ng/kg/day and 500 mg/kg/day.

[0230] The relative amounts of the active ingredient, the pharmaceutically acceptable carrier, and any additional ingredients in a pharmaceutical composition of the invention will vary, depending upon the identity, size, and condition of the subject treated and further depending upon the route by which the composition is to be administered. By way of example, the composition may comprise between 0.1% and 100% (w/w) active ingredient.

[0231] Pharmaceutical compositions that are useful in the methods of the invention may be suitably developed for oral, rectal, vaginal, parenteral, topical, pulmonary, intranasal, buccal, ophthalmic, or another route of administration. A composition useful within the methods of the invention may be directly administered to the skin, or any other tissue of a mammal. Other contemplated formulations include liposomal preparations, resealed erythrocytes containing the active ingredient, and immunologically-based formulations. The route(s) of administration will be readily apparent to the skilled artisan and will depend upon any number of factors including the type and severity of the disease being treated, the type and age of the veterinary or human subject being treated, and the like.

[0232] The formulations of the pharmaceutical compositions described herein may be prepared by any method known or hereafter developed in the art of pharmacology. In general, such preparatory methods include the step of bringing the active ingredient into association with a carrier or one or more other accessory ingredients, and then, if necessary or desirable, shaping or packaging the product into a desired single- or multi-dose unit.

[0233] As used herein, a “unit dose” is a discrete amount of the pharmaceutical composition comprising a predetermined amount of the active ingredient. The amount of the active ingredient is generally equal to the dosage of the active ingredient that would be administered to a subject or a convenient fraction of such a dosage such as, for example, one-half or one-third of such a dosage. The unit dosage form may be for a single daily dose or one of multiple daily doses (e.g., about 1 to 4 or more times per day). When multiple daily doses are used, the unit dosage form may be the same or different for each dose.

[0234] In one embodiment, the compositions of the invention are formulated using one or more pharmaceutically acceptable excipients or carriers. In one embodiment, the pharmaceutical compositions of the invention comprise a therapeutically effective amount of a compound or conjugate of the invention and a pharmaceutically acceptable carrier. Pharmaceutically acceptable carriers that are useful, include, but are not limited to, glycerol, water, saline, ethanol and other pharmaceutically acceptable salt solutions such as phosphates and salts of organic acids. Examples of these and other pharmaceutically acceptable carriers are described in Remington's Pharmaceutical Sciences (1991, Mack Publication Co., New Jersey).

[0235] The carrier may be a solvent or dispersion medium containing, for example, water, ethanol, polyol (for example, glycerol, propylene glycol, and liquid polyethylene glycol, and the like), suitable mixtures thereof, and vegetable oils. The proper fluidity may be maintained, for example, by the use of a coating such as lecithin, by the maintenance of the required particle size in the case of dispersion and by the use of surfactants. Prevention of the action of microorganisms may be achieved by various antibacterial and antifungal agents, for example, parabens, chlorobutanol, phenol, ascorbic acid, thimerosal, and the like. In many cases, isotonic agents, for example, sugars, sodium chloride, or polyalcohols such as mannitol and sorbitol are included in the composition. Prolonged absorption of the injectable compositions may be brought about by including in the composition an agent that delays absorption, for example, aluminum monostearate or gelatin. In one embodiment, the pharmaceutically acceptable carrier is not DMSO alone.

[0236] Formulations may be employed in admixtures with conventional excipients, i.e., pharmaceutically acceptable organic or inorganic carrier substances suitable for oral, vaginal, parenteral, nasal, intravenous, subcutaneous, enteral, or any other suitable mode of administration, known to the art. The pharmaceutical preparations may be sterilized and if desired mixed with auxiliary agents, e.g., lubricants, preservatives, stabilizers, wetting agents, emulsifiers, salts for influencing osmotic pressure buffers, coloring, flavoring and/or aromatic substances and the like. They may also be combined where desired with other active agents, e.g., other analgesic agents.

[0237] As used herein, “additional ingredients” include, but are not limited to, one or more of the following: excipients; surface active agents; dispersing agents; inert diluents; granulating and disintegrating agents; binding agents; lubricating agents; sweetening agents; flavoring agents; coloring agents; preservatives; physiologically degradable compositions such as gelatin; aqueous vehicles and solvents; oily vehicles and solvents; suspending agents; dispersing or wetting agents; emulsifying agents, demulcents; buffers; salts; thickening agents; fillers; emulsifying agents; antioxidants; antibiotics; antifungal agents; stabilizing agents; and pharmaceutically acceptable polymeric or hydrophobic materials. Other “additional ingredients” that may be included in the pharmaceutical compositions of the invention are known in the art and described, for example in Genaro, ed. (1985, Remington's Pharmaceutical Sciences, Mack Publishing Co., Easton, PA), which is incorporated herein by reference.

[0238] The composition of the invention may comprise a preservative from about 0.005% to 2.0% by total weight of the composition. The preservative is used to prevent spoilage in the case of exposure to contaminants in the environment. Examples of preservatives useful in accordance with the invention included but are not limited to those selected from the group consisting of benzyl alcohol, sorbic acid, parabens, imidurea and combinations thereof. An exemplary preservative is a combination of about 0.5% to 2.0% benzyl alcohol and 0.05% to 0.5% sorbic acid.

[0239] In one embodiment, the composition includes an anti-oxidant and a chelating agent that inhibits the degradation of the compound. Exemplary antioxidants for some compounds are BHT, BHA, alpha-tocopherol and ascorbic acid in the range of about 0.01% to 0.3% and BHT in the range of 0.03% to 0.1% by weight by total weight of the composition. In one embodiment, the chelating agent is present in an amount of from 0.01% to 0.5% by weight by total weight of the composition. Exemplary chelating agents include edetate salts (e.g. disodium edetate) and citric acid in the weight range of about 0.01% to 0.20%. In some embodiments, the chelating agent is in the range of 0.02% to 0.10% by weight by total weight of the composition. The chelating agent is useful for chelating metal ions in the composition that may be detrimental to the shelf life of the formulation. While BHT and disodium edetate are exemplary antioxidants and chelating agent respectively for some compounds, other suitable and equivalent antioxidants and chelating agents may be substituted therefore as would be known to those skilled in the art.

[0240] Liquid suspensions may be prepared using conventional methods to achieve suspension of the active ingredient in an aqueous or oily vehicle. Aqueous vehicles include, for example, water, and isotonic saline. Oily vehicles include, for example, almond oil, oily esters, ethyl alcohol, vegetable oils such as arachis, olive, sesame, or coconut oil, fractionated vegetable oils, and mineral oils such as liquid paraffin. Liquid suspensions may further comprise one or more additional ingredients including, but not limited to, suspending agents, dispersing or wetting agents, emulsifying agents, demulcents, preservatives, buffers, salts, flavorings, coloring agents, and sweetening agents. Oily suspensions may further comprise a thickening agent. Known suspending agents include, but are not limited to, sorbitol syrup, hydrogenated edible fats, sodium alginate, polyvinylpyrrolidone, gum tragacanth, gum acacia, and cellulose derivatives such as sodium carboxymethylcellulose, methylcellulose, hydroxypropylmethylcellulose. Known dispersing or wetting agents include, but are not limited to, naturally-occurring phosphatides such as lecithin, condensation products of an alkylene oxide with a fatty acid, with a long chain aliphatic alcohol, with a partial ester derived from a fatty acid and a hexitol, or with a partial ester derived from a fatty acid and a hexitol anhydride (e.g., polyoxyethylene stearate, heptadecaethyleneoxycetanol, polyoxyethylene sorbitol monooleate, and polyoxyethylene sorbitan monooleate, respectively). Known emulsifying agents include, but are not limited to, lecithin, and acacia. Known preservatives include, but are not limited to, methyl, ethyl, or n-propyl-para-hydroxybenzoates, ascorbic acid, and sorbic acid. Known sweetening agents include, for example, glycerol, propylene glycol, sorbitol, sucrose, and saccharin. Known thickening agents for oily suspensions include, for example, beeswax, hard paraffin, and cetyl alcohol.

[0241] Liquid solutions of the active ingredient in aqueous or oily solvents may be prepared in substantially the same manner as liquid suspensions, the primary difference being that the active ingredient is dissolved, rather than suspended in the solvent. As used herein, an “oily” liquid is one which comprises a carbon-containing liquid molecule and which exhibits a less polar character than water. Liquid solutions of the pharmaceutical composition of the invention may comprise each of the components described with regard to liquid suspensions, it being understood that suspending agents will not necessarily aid dissolution of the active ingredient in the solvent. Aqueous solvents include, for example, water, and isotonic saline. Oily solvents include, for example, almond oil, oily esters, ethyl alcohol, vegetable oils such as arachis, olive, sesame, or coconut oil, fractionated vegetable oils, and mineral oils such as liquid paraffin.

[0242] Powdered and granular formulations of a pharmaceutical preparation of the invention may be prepared using known methods. Such formulations may be administered directly to a subject, used, for example, to form tablets, to fill capsules, or to prepare an aqueous or oily suspension or solution by addition of an aqueous or oily vehicle thereto. Each of these formulations may further comprise one or more of dispersing or wetting agent, a suspending agent, and a preservative. Additional excipients, such as fillers and sweetening, flavoring, or coloring agents, may also be included in these formulations.

[0243] A pharmaceutical composition of the invention may also be prepared, packaged, or sold in the form of oil-in-water emulsion or a water-in-oil emulsion. The oily phase may be a vegetable oil such as olive or arachis oil, a mineral oil such as liquid paraffin, or a combination of these. Such compositions may further comprise one or more emulsifying agents such as naturally occurring gums such as gum acacia or gum tragacanth, naturally-occurring phosphatides such as soybean or lecithin phosphatide, esters or partial esters derived from combinations of fatty acids and hexitol anhydrides such as sorbitan monooleate, and condensation products of such partial esters with ethylene oxide such as polyoxyethylene sorbitan monooleate. These emulsions may also contain additional ingredients including, for example, sweetening or flavoring agents.

[0244] Methods for impregnating or coating a material with a chemical composition are known in the art, and include, but are not limited to methods of depositing or binding a chemical composition onto a surface, methods of incorporating a chemical composition into the structure of a material during the synthesis of the material (i.e., such as with a physiologically degradable material), and methods of absorbing an aqueous or oily solution or suspension into an absorbent material, with or without subsequent drying.

[0245] The regimen of administration may affect what constitutes an effective amount. The therapeutic formulations may be administered to the subject either prior to or after a diagnosis of disease. Further, several divided dosages, as well as staggered dosages may be administered daily or sequentially, or the dose may be continuously infused, or may be a bolus injection. Further, the dosages of the therapeutic formulations may be proportionally increased or decreased as indicated by the exigencies of the therapeutic or prophylactic situation.

[0246] Administration of the compositions of the present invention to a subject, include a mammal, for example a human, may be carried out using known procedures, at dosages and for periods of time effective to prevent or treat disease. An effective amount of the therapeutic compound necessary to achieve a therapeutic effect may vary according to factors such as the activity of the particular compound employed; the time of administration; the rate of excretion of the compound; the duration of the treatment; other drugs, compounds or materials used in combination with the compound; the state of the disease or disorder, age, sex, weight, condition, general health and prior medical history of the subject being treated, and like factors well-known in the medical arts. Dosage regimens may be adjusted to provide the optimum therapeutic response. For example, several divided doses may be administered daily or the dose may be proportionally reduced as indicated by the exigencies of the therapeutic situation. A non-limiting example of an effective dose range for a therapeutic compound of the invention is from about 1 and 5,000 mg/kg of body weight/per day. One of ordinary skill in the art would be able to study the relevant factors and make the determination regarding the effective amount of the therapeutic compound without undue experimentation.

[0247] The compound may be administered to a subject as frequently as several times daily, or it may be administered less frequently, such as once a day, once a week, once every two weeks, once a month, or even less frequently, such as once every several months or even once a year or less. It is understood that the amount of compound dosed per day may be administered, in non-limiting examples, every day, every other day, every 2 days, every 3 days, every 4 days, or every 5 days. For example, with every other day administration, a 5 mg per day dose may be initiated on Monday with a first subsequent 5 mg per day dose administered on Wednesday, a second subsequent 5 mg per day dose administered on Friday, and so on. The frequency of the dose will be readily apparent to the skilled artisan and will depend upon any number of factors, such as, but not limited to, the type and severity of the disease being treated, the type and age of the animal, etc.

[0248] Actual dosage levels of the active ingredients in the pharmaceutical compositions of this invention may be varied so as to obtain an amount of the active ingredient that is effective to achieve the desired therapeutic response for a particular subject, composition, and mode of administration, without being toxic to the subject.

[0249] A medical doctor, e.g., physician or veterinarian, having ordinary skill in the art may readily determine and prescribe the effective amount of the pharmaceutical composition required. For example, the physician or veterinarian could start doses of the compounds of the invention employed in the pharmaceutical composition at levels lower than that required in order to achieve the desired therapeutic effect and gradually increase the dosage until the desired effect is achieved.

[0250] In particular embodiments, it is especially advantageous to formulate the compound in dosage unit form for ease of administration and uniformity of dosage. Dosage unit form as used herein refers to physically discrete units suited as unitary dosages for the subjects to be treated; each unit containing a predetermined quantity of therapeutic compound calculated to produce the desired therapeutic effect in association with the required pharmaceutical vehicle. The dosage unit forms of the invention are dictated by and directly dependent on (a) the unique characteristics of the therapeutic compound and the particular therapeutic effect to be achieved, and (b) the limitations inherent in the art of compounding/formulating such a therapeutic compound for the treatment of a disease in a subject.

[0251] In one embodiment, the compositions of the invention are administered to the subject in dosages that range from one to five times per day or more. In another embodiment, the compositions of the invention are administered to the subject in range of dosages that include, but are not limited to, once every day, every two, days, every three days to once a week, and once every two weeks. It will be readily apparent to one skilled in the art that the frequency of administration of the various combination compositions of the invention will vary from subject to subject depending on many factors including, but not limited to, age, disease or disorder to be treated, gender, overall health, and other factors. Thus, the invention should not be construed to be limited to any particular dosage regime and the precise dosage and composition to be administered to any subject will be determined by the attending physical taking all other factors about the subject into account.

[0252] Compounds of the invention for administration may be in the range of from about 1 mg to about 10,000 mg, about 20 mg to about 9,500 mg, about 40 mg to about 9,000 mg, about 75 mg to about 8,500 mg, about 150 mg to about 7,500 mg, about 200 mg to about 7,000 mg, about 3050 mg to about 6,000 mg, about 500 mg to about 5,000 mg, about 750 mg to about 4,000 mg, about 1 mg to about 3,000 mg, about 10 mg to about 2,500 mg, about 20 mg to about 2,000 mg, about 25 mg to about 1,500 mg, about 50 mg to about 1,000 mg, about 75 mg to about 900 mg, about 100 mg to about 800 mg, about 250 mg to about 750 mg, about 300 mg to about 600 mg, about 400 mg to about 500 mg, and any and all whole or partial increments there between.

[0253] In some embodiments, the dose of a compound of the invention is from about 1 mg and about 2,500 mg. In some embodiments, a dose of a compound of the invention used in compositions described herein is less than about 10,000 mg, or less than about 8,000 mg, or less than about 6,000 mg, or less than about 5,000 mg, or less than about 3,000 mg, or less than about 2,000 mg, or less than about 1,000 mg, or less than about 500 mg, or less than about 200 mg, or less than about 50 mg. Similarly, in some embodiments, a dose of a second compound (i.e., a drug used for treating the same or another disease as that treated by the compositions of the invention) as described herein is less than about 1,000 mg, or less than about 800 mg, or less than about 600 mg, or less than about 500 mg, or less than about 400 mg, or less than about 300 mg, or less than about 200 mg, or less than about 100 mg, or less than about 50 mg, or less than about 40 mg, or less than about 30 mg, or less than about 25 mg, or less than about 20 mg, or less than about 15 mg, or less than about 10 mg, or less than about 5 mg, or less than about 2 mg, or less than about 1 mg, or less than about 0.5 mg, and any and all whole or partial increments thereof.

[0254] In one embodiment, the present invention is directed to a packaged pharmaceutical composition comprising a container holding a therapeutically effective amount of a compound or conjugate of the invention, alone or in combination with a second pharmaceutical agent; and instructions for using the compound or conjugate to treat, prevent, or reduce one or more symptoms of a disease in a subject.

[0255] The term “container” includes any receptacle for holding the pharmaceutical composition. For example, in one embodiment, the container is the packaging that contains the pharmaceutical composition. In other embodiments, the container is not the packaging that contains the pharmaceutical composition, i.e., the container is a receptacle, such as a box or vial that contains the packaged pharmaceutical composition or unpackaged pharmaceutical composition and the instructions for use of the pharmaceutical composition. Moreover, packaging techniques are well known in the art. It should be understood that the instructions for use of the pharmaceutical composition may be contained on the packaging containing the pharmaceutical composition, and as such the instructions form an increased functional relationship to the packaged product. However, it should be understood that the instructions may contain information pertaining to the compound's ability to perform its intended function, e.g., treating or preventing a disease in a subject, or delivering an imaging or diagnostic agent to a subject.

[0256] Routes of administration of any of the compositions of the invention include oral, nasal, parenteral, sublingual, transdermal, transmucosal (e.g., sublingual, lingual, (trans)buccal, and (intra)nasal,), intravesical, intraduodenal, intragastrical, rectal, intra-peritoneal, subcutaneous, intramuscular, intradermal, intra-arterial, intravenous, or administration.

[0257] Suitable compositions and dosage forms include, for example, tablets, capsules, caplets, pills, gel caps, troches, dispersions, suspensions, solutions, syrups, granules, beads, transdermal patches, gels, powders, pellets, magmas, lozenges, creams, pastes, plasters, lotions, discs, suppositories, liquid sprays for nasal or oral administration, dry powder or aerosolized formulations for inhalation, compositions and formulations for intravesical administration and the like. It should be understood that the formulations and compositions that would be useful in the present invention are not limited to the particular formulations and compositions that are described herein.

### Methods of Decreasing RNA & Methods of Treatment

[0258] In one aspect, the invention provides methods of decreasing the number of a nuclear RNA in a subject. In one embodiment, nuclear RNA is abnormal nuclear RNA. In one embodiment, the method comprises administering to the subject (1) a nucleic acid molecule encoding a fusion protein of the disclosure comprising a Cas protein, an RNase protein, and optionally a localization sequence, such as an NLS or NES, or a fusion protein of the disclosure comprising a Cas protein, an RNase protein, and optionally a localization sequence, such as an NLS or NES; and (2) a nucleic acid molecule encoding a guide nucleic acid molecule comprising a targeting nucleotide sequence complimentary to a target RNA sequence in the RNA or a guide nucleic acid molecule comprising a targeting nucleotide sequence complimentary to a target RNA sequence in the RNA.

[0259] In some embodiments, the RNA comprises cytoplasmic RNA. In such embodiments, the method comprises administering to the subject (1) a nucleic acid molecule encoding a fusion protein of the disclosure comprising a Cas protein, and an RNase protein, or a fusion protein of the disclosure comprising a Cas protein, and an RNase protein; and (2) a nucleic acid molecule encoding a guide nucleic acid molecule comprising a targeting nucleotide sequence complimentary to a target RNA sequence, or a guide nucleic acid molecule comprising a targeting nucleotide sequence complimentary to a target RNA sequence.

[0260] In some embodiments, the method comprises administering to the subject (1) a nucleic acid molecule encoding a fusion protein of the disclosure comprising a Cas protein, an RNase protein and an NES or a fusion protein of the disclosure comprising a Cas protein, an RNase protein, and an NES; and (2) a nucleic acid molecule encoding a guide nucleic acid molecule comprising a targeting nucleotide sequence complimentary to a target RNA sequence, or a guide nucleic acid molecule comprising a targeting nucleotide sequence complimentary to a target RNA sequence.

[0261] In some embodiments, the RNA comprises nuclear RNA. In such embodiments, the method comprises administering to the subject (1) a nucleic acid molecule encoding a fusion protein of the disclosure comprising a Cas protein, an RNase protein and an NLS or a fusion protein of the disclosure comprising a Cas protein, an RNase protein, and an NLS; and (2) a nucleic acid molecule encoding a guide nucleic acid molecule comprising a targeting nucleotide sequence complimentary to a target RNA sequence, or a guide nucleic acid molecule comprising a targeting nucleotide sequence complimentary to a target RNA sequence.

[0262] In one embodiment, the subject is a cell. In one embodiment, the cell is a prokaryotic cell or eukaryotic cell. In one embodiment, the cell is a eukaryotic cell. In one embodiment, the cell is a plants, animals, or fungi cell. In one embodiment, the cell is a plant cell. In one embodiment, the cell is an animal cell. In one embodiment, the cell is a yeast cell.

[0263] In one embodiment, the subject is a mammal. For example, in one embodiment, the subject is a human, non-human primate, dog, cat, horse, cow, goat, sheep, rabbit, pig, rat, or mouse. In one embodiment, the subject is a non-mammalian subject. For example, in one embodiment, the subject is a zebrafish, fruit fly, or roundworm.

[0264] In one embodiment, the amount of nuclear RNA is reduced in vitro. In one embodiment, the amount of nuclear RNA is reduced in vivo.

[0265] In one embodiment, the nuclear RNA is nuclear RNA foci. In one embodiment, the nuclear RNA foci include a CUG repeat. In one embodiment, the guide nucleic acid comprises a sequence complementary to a CUG repeat expansion. In one embodiment, the guide nucleic acid comprises a sequence complementary to a CTG repeat expansion. In one embodiment, the guide nucleic acid comprises a sequence complementary to a CTG repeat expansion in the 3′UTR of the human dystrophia myotonica-protein kinase (DMPK) gene. In one embodiment, the guide nucleic acid comprises a sequence of one of SEQ ID NOs:798-800.

[0266] In one aspect, the present invention provides methods of treating a subject with a disease or disorder associated with abnormal nuclear RNA. In one embodiment, the method comprises administering to the subject (1) a nucleic acid molecule encoding a fusion protein of the disclosure comprising a Cas protein, an RNase protein, and optionally a localization sequence, such as an NLS or NES, or a fusion protein of the disclosure comprising a Cas protein, an RNase protein, and optionally a localization sequence, such as an NLS or NES; and (2) a nucleic acid molecule encoding a guide nucleic acid molecule comprising a targeting nucleotide sequence complimentary to a target RNA sequence in the nuclear RNA or a guide nucleic acid molecule comprising a targeting nucleotide sequence complimentary to a target RNA sequence in the nuclear RNA.

[0267] In one embodiment, the disease or disorder associated with abnormal nuclear RNA is selected from the group consisting of Myotonic Dystrophy type 2 (DM2), Amyotrophic lateral sclerosis (ALS), Huntington's disease-like 2 (HDL2), Spinocerebellar ataxias 8, 31 and 10 (SCAB, -31, -10) and fragile X-associated tremor ataxia syndrome (FXTAS).

[0268] In one embodiment, the abnormal nuclear RNA is toxic nuclear RNA foci. In one embodiment, the disease or disorder associated with toxic nuclear RNA foci Myotonic Dystrophy type 1. In one embodiment, the targeting nucleotide sequence comprises a sequence complementary to a CTG repeat expansion in the 3′UTR of the human dystrophia myotonica-protein kinase (DMPK) gene. In one embodiment, the targeting nucleotide sequence comprises a sequence selected from the group consisting of SEQ ID NOs: 798-800.

[0269] In one aspect, the present invention provides methods cleaving of nuclear RNA in a subject. In one embodiment, the method comprises administering to the subject (1) a nucleic acid molecule encoding a fusion protein of the disclosure comprising a Cas protein, an RNase protein, and optionally a localization sequence, such as an NLS or NES, or a fusion protein of the disclosure comprising a Cas protein, an RNase protein, and optionally a localization sequence, such as an NLS or NES; and (2) a nucleic acid molecule encoding a guide nucleic acid molecule comprising a targeting nucleotide sequence complimentary to a target RNA sequence in the nuclear RNA or a guide nucleic acid molecule comprising a targeting nucleotide sequence complimentary to a target RNA sequence in the nuclear RNA.

[0270] In one aspect, the present invention provides methods of treating a disease or disorder associated with increased gene expression. In one embodiment, the method comprises administering to the subject (1) a nucleic acid molecule encoding a fusion protein of the disclosure comprising a Cas protein, an RNase protein, and optionally a localization sequence, such as an NLS or NES, or a fusion protein of the disclosure comprising a Cas protein, an RNase protein, and optionally a localization sequence, such as an NLS or NES; and (2) a nucleic acid molecule encoding a guide nucleic acid molecule comprising a targeting nucleotide sequence complimentary to a target RNA sequence in the RNA transcript of the gene or a guide nucleic acid molecule comprising a targeting nucleotide sequence complimentary to a target RNA sequence in the RNA transcript of the gene. In one embodiment, the Cas protein cleaves the RNA transcript thereby preventing translation and protein expression.

[0271] In one aspect, the present invention provides methods of treating a disease or disorder associated with RNA. For example, in one embodiment, the invention provides a method of treating an RNA virus infection. In one embodiment, the method comprises administering to the subject (1) a nucleic acid molecule encoding a fusion protein of the disclosure comprising a Cas protein, an RNase protein, and optionally a localization sequence, such as an NLS or NES, or a fusion protein of the disclosure comprising a Cas protein, an RNase protein, and optionally a localization sequence, such as an NLS or NES; and (2) a nucleic acid molecule encoding a guide nucleic acid molecule comprising a targeting nucleotide sequence complimentary to a target RNA sequence in the viral RNA or a guide nucleic acid molecule comprising a targeting nucleotide sequence complimentary to a target RNA sequence in the viral RNA. In one embodiment, the Cas protein binds the crRNA, the crRNA binds a target RNA sequence, and the RNase cleaves the RNA sequence thereby preventing translation and expression of viral protein.

### Methods of Treatment and Use

[0272] The present invention provides methods of treating, reducing the symptoms of, and/or reducing the risk of developing a disease or disorder in a subject. For example, in one embodiment, methods of the invention can be used to treat, reduce the symptoms of, and/or reduce the risk of developing a disease or disorder in a mammal. In one embodiment, the methods of the invention can be used to treat, reduce the symptoms of, and/or reduce the risk of developing a disease or disorder in a plant. In one embodiment, the methods of the invention can be used treat, reduce the symptoms of, and/or reduce the risk of developing a disease or disorder in a yeast organism.

[0273] In one embodiment, the subject is a cell. In one embodiment, the cell is a prokaryotic cell or eukaryotic cell. In one embodiment, the cell is a eukaryotic cell. In one embodiment, the cell is a plants, animals, or fungi cell. In one embodiment, the cell is a plant cell. In one embodiment, the cell is an animal cell. In one embodiment, the cell is a yeast cell.

[0274] In one embodiment, the subject is a mammal. For example, in one embodiment, the subject is a human, non-human primate, dog, cat, horse, cow, goat, sheep, rabbit, pig, rat, or mouse. In one embodiment, the subject is a non-mammalian subject. For example, in one embodiment, the subject is a zebrafish, fruit fly, or roundworm.

[0275] In one embodiment, the disease or disorder is caused by one or more mutations in a genomic locus. Thus, in one embodiment, the disease or disorder is may be treated, reduced, or the risk can be reduced via an element that prevents or reduces mRNA transcript, or prevents or reduces translation of the protein. Thus, in one embodiment, the method comprises manipulation of an RNA transcript.

[0276] In one embodiment, the disease or disorder is caused by abnormal RNA. Thus, in one embodiment, the disease or disorder is may be treated, reduced, or the risk can be reduced via an element that prevents or reduces RNA transcript. Thus, in one embodiment, the method comprises manipulation of an RNA transcript.

[0277] In one embodiment, the method comprises administering to the subject (1) a fusion protein of the disclosure or a nucleic acid molecule encoding a fusion protein of the disclosure, and (2) one or more targeting nucleic acid molecules comprising a targeting nucleotide sequence complimentary to a target region in a gene, wherein the gene encodes the RNA transcript. In one embodiment, the RNase cleaves the RNA transcript.

[0278] In one embodiment, the method comprises administering to the subject (1) a fusion protein of the disclosure or a nucleic acid molecule encoding a fusion protein of the disclosure, and (2) one or more targeting nucleic acid molecules comprising a targeting nucleotide sequence complimentary to a target region in an RNA transcript. In one embodiment, the RNase cleaves the RNA transcript.

[0279] In one embodiment, the disease or disorder is associated with abnormal RNA or increased RNA transcription. For example, in one embodiment, the disease or disorder is an endocrine disease. For example, in one embodiment, endocrine diseases include but are not limited to, β-thalassemias, neonatal diabetes, IPEX syndrome, Mayer-Rokitanski-Kiister-Hausersyndrome, Hypothalamic-pituitary-adrenal axis dysregulation, Adrenal dysfunction, Gonadal dysfunction, Ectopic Cushing syndrome, Pre-eclampsia, Diabetic nephropathy, Type I diabetes, Type II diabetes, and IGF-1 deficiency.

[0280] In one embodiment, the disease or disorder is a tumorigenic disease. For example, in one embodiment, tumorigenic diseases include but are not limited to, mantle cell lymphoma, hereditary & sporadic parathyroid tumors, Medullary thyroid carcinoma, poliverative conditions, colorectal cancer, gliblastoma, Chronic lymphocytic leukemia, and Breast cancer.

[0281] In one embodiment, the disease or disorder is a neurological disease or disorder. For example, in one embodiment, neurological diseases include but are not limited to, Parkinsons diseases, Oculopharyngeal muscular dystrophy, Huntington's disease, Fabry disease, Fragile X syndrome, spinal muscular atrophy, Amyotrophic Lateral Sclerosis, Spinocerebellar ataxia Spinocerebellar ataxia 1, Spinocerebellar ataxia 2, Spinocerebellar ataxia 3, Spinocerebellar ataxia 6, Spinocerebellar ataxia 7, Spinocerebellar ataxia 8, Spinocerebellar ataxia 10, Spinocerebellar ataxia 17, Spinocerebellar ataxia 31, and Alzheimer's disease,

[0282] In one embodiment, the disease or disorder is a hematological disease or disorder. For example, in one embodiment, hematological diseases include but are not limited to, (3-Thalassemia, and a-Thalassemia.

[0283] In one embodiment, the disease or disorder is an infection or immunological disease or disorder. For example, in one embodiment, infection or immunological diseases include but are not limited to, B-cell differentiation, T-cell activation, systemic lupus erythematosus, Wiskott-Aldrich syndrome, Osteoarthritis, scleroderma, and IPEX syndrome.

[0284] In one embodiment, the disease or disorder is a musculoskeletal disease or disorder. For example, in one embodiment, infection or immunological diseases include Myotonic dystrophy type 1, Spinal and bulbar muscular atrophy, and Dentatorubral-pallidoluysian atrophy.

[0285] Exemplary diseases or disorders and corresponding targets include, but are not limited to those listed in Table 1. Additional diseases and disorders and corresponding genes are known in the art, for example in Rehfeld et al., Alternations in Polyadenylation and its Implications for Endocrine Disease, Front. Endocrinol. 4:53 (2013), Chang et al., Alternative Polyadenylation in Human Diseases, Endocrinol Metab. 32:413-421 (2017), and Curinha et al., Implications of polyadenylation in health and disease, Nucleus 5:508-519 (2014), which are herein incorporated by reference in their entireties.

TABLE 2
Diseases or disorders and target gene

| Condition | Target |
|---|---|
| Adrenal dysfunction | STAR |
| Alzheimer's disease | ABCA3, EIF2B3, MSTO2P, OGDHL, PARP6, |
| | SLC33A1, SUPV3L1, TAF3, WASH7P, JAK1, |
| | ABCA3, UBR1, ALDOC, C10ord10, |
| | GABARAPL2, KAT2A, POLR3A, |
| | SH3BGRL2, TIMM23, TMC6, UNC80, WTAP |
| Amyotrophic Lateral Sclerosis | ALS (GGGGCC repeat), CCDC92, CRYAB, |
| | MAP7D2, PRPH, RTN4, SEC22B, SNAP25, |
| | UCHL1, YWHAB, C14ord2, C6orf203, |
| | ALDOC, ARL6IP1, CSDE1, CMC2, GAP43, |
| | LDHB, MLLT11, NCL, PFN2, TMOD1, |
| | VAMP1 |
| B-cell differentiation | IGHM |
| Breast cancer | |
| Cancer, Colorectal | DMKN, PDXK, PPIE |
| Cancer, Various | TP53 |
| Chronic lymphocytic leukaemia | Intronic loci |
| Colorectal cancer | DMKN, PDXK, PPIE |
| Dentatorubral-pallidoluysian atrophy | DRPLA (CAG repeat) |
| Diabetic nephropathy | HGRG-14 |
| Ectopic Cushing syndrome | ACTH |
| Fabry disease | α-GalA |
| Fragile X Syndrome | FMR1, FXTAS (CGG repeat) |
| Friedreich's Ataxia | YSH1 |
| Glioblastoma | CCND1, MECP2 |
| Gonadal dysfunction | STAR |
| Huntington's disease | HTT, HD (CAG repeat) |
| Huntington's disease-like 2 | HDL2 (CTG repeat) |
| Hypothalamic-pituitary-adrenal axis dysregulation | SERT |
| IGF-1 deficiency | IGF-1 |
| IPEX syndrome | FOP3 |
| Mayer-Rokitanski-Küster-Hausersyndrome | AMH |
| Myotonic Dystrophy Type I | DMPK, DM1 (CTG Repeat), DM2 (CCTG |
| | repeat) |
| Myotonic Dystrophy Type II | ZFN9 |
| Neonatal diabetes | INS |
| Oculopharyngeal muscular dystrophy | CCND1, PABPN1 |
| Parkinson disease | SNCA |
| Pre-eclampsia | SFLT-1 |
| Proliferative conditions | RBX1 |
| Spinal Muscular Atrophy | SMN |
| Spinocerebellar Ataxia 1 | ATXN1, SCA1 (CAG repeat) |
| Spinocerebellar Ataxia 10 | ATXN10, SCA10 (ATTCT repeat) |
| Spinocerebellar Ataxia 17 | TATA-box binding protein, SCA17 (CAG |
| | repeat) |
| Spinocerebellar Ataxia 2 | ATXN2, SCA2 (CAG repeat) |
| Spinocerebellar Ataxia 3 | ATXN3, SCA3 (CAG repeat) |
| Spinocerebellar Ataxia 31 | BEAN1, SCA31 (TGGA repeat) |
| Spinocerebellar Ataxia 6 | CACNA1A, SCA6 (CAG repeat) |
| Spinocerebellar Ataxia 7 | TPP1, SCA7 (CAG repeat) |
| Spinocerebellar Ataxia 8 | ATXN8OS, SCA8 (CTG/CAG repeat) |
| Spinal and bulbar muscular atrophy | SBMA (CAG repeat) |
| Steroidogenesis | STAR |
| Systemic lupus erythematosus | GIMAP5 |
| Systemic lupus erythematosus | IRF5 |
| T-cell activation | NF-ATC1 |
| Thrombophilia | F2 |
| Type I diabetes | GIMAP5 |
| Type II diabetes | TCF7L2 |
| Wiskott-Aldrich Syndrome | WAS |
| α-Thalassemia | HBA1, HBA2 |
| β-Thalassemia | HBB |

[0286] In one embodiment, the disease or disorder is a viral infection. Thus, in one embodiment, the disease or disorder is may be treated, reduced, or the risk can be reduced via an element that prevents or reduces viral mRNA transcript, or prevents or reduces translation of viral protein. Thus, in one embodiment, the method comprises manipulation of a viral RNA transcript.

[0287] In one embodiment, the method comprises administering to the subject (1) a fusion protein of the disclosure or a nucleic acid molecule encoding a fusion protein of the disclosure, and (2) one or more targeting nucleic acid molecules comprising a targeting nucleotide sequence complimentary to a viral RNA transcript. In one embodiment, the RNase cleaves the viral RNA transcript.

[0288] In one embodiment, the virus is an RNA virus. In one embodiment, the virus produces RNA during its lifecycle. In one embodiment, the virus is a human virus, a plant virus or an animal virus. Exemplary viruses include, but are not limited to, viruses of families Adenoviridae, Adenoviridae, Alphaflexiviridae, Anelloviridae, Arenavirus, Arteriviridae, Asfarviridae, Astroviridae, Benyviridae, Betaflexiviridae, Birnaviridae, Bornaviridae, Bromoviridae, Caliciviridae, Caulimoviridae, Circoviridae, Closteroviridae, Coronaviridae, Filoviridae, Flaviviridae, Geminiviridae, Hantaviridae, Hepadnaviridae, Hepeviridae, Herpesviridae, Kitaviridae, Luteoviridae, Nairoviridae, Nanoviridae, Nimaviridae, Orthomyxoviridae, Paramyxoviridae, Phenuiviridae, Picornaviridae, Polyomaviridae, Pospiviridae, Potyviridae, Poxviridae, Reoviridae, Retroviridae, Retrovirus, Rhabdoviridae, Secoviridae, Togaviridae, Tombusviridae, Tospoviridae, Tymoviridae, and Virgaviridae. For example, exemplary viruses include, but are not limited to, African swine fever, Avian hepatitis E, Avian infectious laryngotracheitis, Avian nephritis virus, Bamboo mosaic virus, Banana bunchy top virus, Barley stripe mosaic virus, Barley yellow dwarf virus, Potato leafroll virus, Borna disease, Brome mosaic virus, wheat, Cauliflower mosaic virus, Chikungunya, Eastern equine encephalitis virus, Citrus leprosis, Citrus sudden death associated virus, Citrus tristeza virus, Coconut cadang-cadang viroid, Curly top virus, African cassava mosaic virus, Cytomegalovirus, Epstein-Barr virus, Dengue, Yellow fever, West Nile, Zika, Ebola virus, Marburg virus, Equine arteritis virus, Porcine reproductive and respiratory syndrome virus, Equine infectious anemia, Foot and mouth disease, Foot and mouth disease, Enteroviruses, Rhinoviruses, Hepatitis B virus, Hepatitis E virus, HIV, HIV-1, HIV-2, Infectious bursal disease virus (poultry), Infectious pancreatic necrosis (salmon), Infectious canine hepatitis, aviadenoviruses of fowl, Influenza viruses, Lassa virus, Lymphocytic choriomeningitis virus, Monkeypox, Nairobi sheep disease, Newcastle disease virus (poultry), Norwalk virus, Numerous examples of crop damaging viruses, including Potato virus Y, Porcine circovirus 2, Beak and feather disease virus (poultry), Potato virus M, Rabies virus, Respiratory and enteric adenoviruses, Respiratory syncytial virus, Rice stripe necrosis virus, Rift Valley fever, rotaviruses, SARS-CoV-2, MERS, Sheeppox virus, Lumpy skin disease virus, Sin Nombre virus, Andes virus, SV40, Tobacco ringspot virus, Tomato bushy stunt virus, Tomato spotted wilt virus, Torque teno virus, Venezuelan equine encephalitis virus, Vesicular stomatitis Indiana virus, Viral hemorrhagic septicemia (trout), and White spot syndrome virus (shrimp).

[0289] In one embodiment, exemplary viruses include, but are not limited to, Primate T-lymphotropic virus 1, Primate T-lymphotropic virus 2, Primate T-lymphotropic virus 3, Human immunodeficiency virus 1, Human immunodeficiency virus 2, Simian foamy virus, Human picobirnavirus, Colorado tick fever virus, Changuinola virus, Great Island virus, Lebombo virus, Orungo virus, Rotavirus A, Rotavirus B, Rotavirus C, Banna virus, Borna disease virus, Lake Victoria Marburgvirus, Reston ebolavirus, Sudan ebolavirus, Tai forest ebolavirus, Zaire virus, Human parainfluenza virus 2, Human parainfluenza virus 4, Mumps virus, Newcastle disease virus, Human parainfluenza virus 1, Human parainfluenza virus 3, Hendra virus, Nipah virus, Measles virus, Human respiratory syncytial virus, Human metapneumovirus, Chandipura virus, Isfahan virus, Piry virus, Vesicular stomatitis Alagoas virus, Vesicular stomatitis Indiana virus, Vesicular stomatitis New Jersey virus, Australian bat lyssavirus, Duvenhage virus, European bat lyssavirus 1, European bat lyssavirus 2, Mokola virus, Rabies virus, Guanarito virus, Junin virus, Lassa virus, Lymphocytic choriomeningitis virus, Machupo virus, Pichinde virus, Sabia virus, Whitewater Arroyo virus, Bunyamwera virus, Bwamba virus, California encephalitis virus, Caraparu virus, Catu virus, Guama virus, Guaroa virus, Kairi virus, Marituba virus, Oriboca virus, Oropouche virus, Shuni virus, Tacaiuma virus, Wyeomyia virus, Andes virus, Bayou virus, Black creek canal virus, Dobrava-Belgrade virus, Hantaan virus, Laguna Negra virus, New York virus, Puumala virus, Seoul virus, Sin Nombre virus, Crimean-Congo haemorrhagic fever virus, Dugbe virus, Candiru virus, Punta Toro virus, Rift Valley fever virus, Sandfly fever Naples virus, Influenza A virus, Influenza B virus, Influenza C virus, Dhori virus, Thogoto virus, Hepatitis delta virus, Human coronavirus 229E, Human coronavirus NL63, Human coronavirus HKU1, Human coronavirus OC43, SARS coronavirus, Human torovirus, Human enterovirus A, Human enterovirus B, Human enterovirus C, Human enterovirus D, Human rhinovirus A, Human rhinovirus B, Human rhinovirus C, Encephalomyocarditis virus, Theilovirus, Equine rhinitis A virus, Foot and mouth disease virus, Hepatitis A virus, Human parechovirus, Ljungan virus, Aichi virus, Human astrovirus, Human astrovirus 2, Human astrovirus 3, Human astrovirus 4, Human astrovirus 5, Human astrovirus 6, Human astrovirus 7, Human astrovirus 8, Norwalk virus, Sapporo virus, Aroa virus, Banzi virus, Dengue virus, Ilheus virus, Japanese encephalitis virus, Kokobera virus, Kyasanur forest disease virus, Louping ill virus, Murray Valley encephalitis virus, Ntaya virus, Omsk haemorrhagic fever virus, Powassan virus, Rio Bravo virus, St Louis encephalitis virus, Tick-borne encephalitis virus, Usutu virus, Wesselsbron virus, West Nile virus, Yellow fever virus, Zika virus, Hepatitis C virus, Hepatitis E virus, Barmah Forest virus, Chikungunya virus, Eastern equine encephalitis virus, Everglades virus, Getah virus, Mayaro virus, Mucambo virus, O'nyong-nyong virus, Pixuna virus, Ross River virus, Semliki Forest virus, Sindbis virus, Venezuelan equine encephalitis virus, Western equine encephalitis virus, Whataroa virus, Rubella virus.

In one embodiment, exemplary viruses include, but are not limited to, Ranid herpesvirus 1, Ranid herpesvirus 2, Ranid herpesvirus 3, Anguillid herpesvirus 1, Cyprinid herpesvirus 1, Cyprinid herpesvirus 2, Cyprinid herpesvirus 3, Acipenserid herpesvirus 2, Ictalurid herpesvirus 1, Ictalurid herpesvirus 2, Salmonid herpesvirus 1, Salmonid herpesvirus 2, Salmonid herpesvirus 3, Gallid alphaherpesvirus 1, Psittacid alphaherpesvirus 1, Anatid alphaherpesvirus 1, Columbid alphaherpesvirus 1, Gallid alphaherpesvirus 2, Gallid alphaherpesvirus 3, Meleagrid alphaherpesvirus 1, Spheniscid alphaherpesvirus 1, Chelonid alphaherpesvirus 5, Testudinid alphaherpesvirus 3, Ateline alphaherpesvirus 1, Bovine alphaherpesvirus 2, Cercopithecine alphaherpesvirus 2, Human alphaherpesvirus 1, Human alphaherpesvirus 2, Leporid alphaherpesvirus 4, Macacine alphaherpesvirus 1, Macropodid alphaherpesvirus 1, Macropodid alphaherpesvirus 2, Panine alphaherpesvirus 3, Papiine alphaherpesvirus 2, Pteropodid alphaherpesvirus 1, Saimiriine alphaherpesvirus 1, Bovine alphaherpesvirus 1, Bovine alphaherpesvirus 5, Bubaline alphaherpesvirus 1, Canid alphaherpesvirus 1, Caprine alphaherpesvirus 1, Cercopithecine alphaherpesvirus 9, Cervid alphaherpesvirus 1, Cervid alphaherpesvirus 2, Equid alphaherpesvirus 1, Equid alphaherpesvirus 3, Equid alphaherpesvirus 4, Equid alphaherpesvirus 8, Equid alphaherpesvirus 9, Felid alphaherpesvirus 1, Human alphaherpesvirus 3, Monodontid alphaherpesvirus 1, Phocid alphaherpesvirus 1, Suid alphaherpesvirus 1, Chelonid alphaherpesvirus 6, Aotine betaherpesvirus 1, Cebine betaherpesvirus 1, Cercopithecine betaherpesvirus 5, Human betaherpesvirus 5, Macacine betaherpesvirus 3, Macacine betaherpesvirus 8, Mandrilline betaherpesvirus 1, Panine betaherpesvirus 2, Papiine betaherpesvirus 3, Papiine betaherpesvirus 4, Saimiriine betaherpesvirus 4, Murid betaherpesvirus 1, Murid betaherpesvirus 2, Murid betaherpesvirus 8, Elephantid betaherpesvirus 1, Elephantid betaherpesvirus 4, Elephantid betaherpesvirus 5, Human betaherpesvirus 7, Human betaherpesvirus 6A, Human betaherpesvirus 6B, Macacine betaherpesvirus 9, Murid betaherpesvirus 3, Suid betaherpesvirus 2, Caviid betaherpesvirus 2, Tupaiid betaherpesvirus 1, Callitrichine gammaherpesvirus 3, Cercopithecine gammaherpesvirus 14, Gorilline gammaherpesvirus 1, Human gammaherpesvirus 4, Macacine gammaherpesvirus 4, Macacine gammaherpesvirus 10, Panine gammaherpesvirus 1, Papiine gammaherpesvirus 1, Pongine gammaherpesvirus 2, Alcelaphine gammaherpesvirus 1, Alcelaphine gammaherpesvirus 2, Bovine gammaherpesvirus 6, Caprine gammaherpesvirus 2, Hippotragine gammaherpesvirus 1, Ovine gammaherpesvirus 2, Suid gammaherpesvirus 3, Suid gammaherpesvirus 4, Suid gammaherpesvirus 5, Equid gammaherpesvirus 2, Equid gammaherpesvirus 5, Felid gammaherpesvirus 1, Mustelid gammaherpesvirus 1, Phocid gammaherpesvirus 3, Vespertilionid gammaherpesvirus 1, Ateline gammaherpesvirus 2, Ateline gammaherpesvirus 3, Bovine gammaherpesvirus 4, Cricetid gammaherpesvirus 2, Human gammaherpesvirus 8, Macacine gammaherpesvirus 5, Macacine gammaherpesvirus 8, Macacine gammaherpesvirus 11, Macacine gammaherpesvirus 12, Murid gammaherpesvirus 4, Murid gammaherpesvirus 7, Saimiriine gammaherpesvirus 2, Equid gammaherpesvirus 7, Phocid gammaherpesvirus 2, Saguinine gammaherpesvirus 1, Iguanid herpesvirus 2, Haliotid herpesvirus 1, Ostreid herpesvirus 1, Salmonella virus SKML39, Shigella virus AG3, Dickeya virus Limestone, Dickeya virus RC2014, Escherichia virus CBA120, Escherichia virus PhaxI, Salmonella virus 38, Salmonella virus Det7, Salmonella virus GG32, Salmonella virus PM10, Salmonella virus SFP10, Salmonella virus SH19, Salmonella virus SJ3, Escherichia virus KWBSE43-6, Klebsiella virus 0507KN21, Klebsiella virus KpS110, Klebsiella virus May, Klebsiella virus Menlow, Serratia virus IME250, Erwinia virus Ea2809, Serratia virus MAM1, Acinetobacter virus Acibel007, Acinetobacter virus AB3, Acinetobacter virus AbKT21III, Acinetobacter virus Abp1, Acinetobacter virus Aci07, Acinetobacter virus Aci08, Acinetobacter virus AS11, Acinetobacter virus AS12, Acinetobacter virus Fri1, Acinetobacter virus IME200, Acinetobacter virus PD6A3, Acinetobacter virus PDAB9, Acinetobacter virus phiAB1, Acinetobacter virus SH-Ab 15519, Acinetobacter virus SWHAb1, Acinetobacter virus SWHAb3, Acinetobacter virus WCHABP5, Acintetobacter virus B1, Acintetobacter virus B2, Acintetobacter virus B5, Acintetobacter virus D2, Acintetobacter virus P1, Acintetobacter virus P2, Acintetobacter virus phiAB6, Acinetobacter virus Petty, Vibrio virus Vc1, Vibrio virus A318, Vibrio virus AS51, Vibrio virus Vp670, Marinomonas virus CBSA, Marinomonas virus CPP1m, Vibrio virus VEN, Pseudomonas virus Achelous, Pseudomonas virus Alpheus, Pseudomonas virus Nerthus, Pseudomonas virus Njord, Pseudomonas virus uligo, Pseudomonas virus C171, Pectobacterium virus PP16, Pectobacterium virus PPWS1, Pectobacterium virus PPWS2, Pectobacterium virus CBS, Pectobacterium virus Clickz, Pectobacterium virus fM1, Pectobacterium virus Gaspode, Pectobacterium virus Khlen, Pectobacterium virus Koot, Pectobacterium virus Lelidair, Pectobacterium virus Nobby, Pectobacterium virus Peatl, Pectobacterium virus Phoria, Pectobacterium virus PP90, Pectobacterium virus Zenivior, Dickeya virus BF25-12, Pseudomonas virus NV3, Pseudomonas virus 130-113, Pseudomonas virus 15pyo, Pseudomonas virus Ab05, Pseudomonas virus ABTNL, Pseudomonas virus DL62, Pseudomonas virus kF77, Pseudomonas virus LKD16, Pseudomonas virus LUZ19, Pseudomonas virus MPK6, Pseudomonas virus MPK7, Pseudomonas virus NFS, Pseudomonas virus PAXYB1, Pseudomonas virus phiKMV, Pseudomonas virus PT2, Pseudomonas virus PTS, Pseudomonas virus RLP, Pseudomonas virus LKA1, Pseudomonas virus f2, Aeromonas virus 25AhydR2PP, Aeromonas virus AS7, Aeromonas virus ZPAH7, Yersinia virus ISAO8, Aeromonas virus Ahp1, Aeromonas virus CF7, Cronobacter virus DevCD23823, Cronobacter virus GAP227, Salmonella virus Spp16, Yersinia virus R8-01, Yersinia virus fHeYen301, Yersinia virus Phi80-18, Pectobacterium virus Arno160, Pectobacterium virus PP2, Proteus virus PM85, Proteus virus PM93, Proteus virus PM116, Proteus virus Pm5460, Pectobacterium virus PP1, Erwinia virus Era103, Erwinia virus S2, Lelliottia virus phD2B, Citrobacter CrRp3, Escherchia virus LL11, Escherichia virus AAPEc6, Escherichia virus ACGC91, Escherichia virus B, Escherichia virus C, Escherichia virus K, Escherichia virus K1-5, Escherichia virus K1E, Escherichia virus mutPK1A2, Escherichia virus VEc3, Escherichia virus UAB78, Salmonella virus BP12B, Salmonella virus SP6, Burkholderia virus BpAMP1, Ralstonia virus RSPI1, Ralstonia virus RSB1, Ralstonia virus RsoP1IDN, Burkholderia virus JG068, Ralstonia virus RSJ2, Ralstonia virus RSJ5, Ralstonia virus RSPII1, Shigella virus Buco, Escherichia virus Minorna, Klebsiella virus AltoGao, Klebsiella virus BO1E, Klebsiella virus F19, Klebsiella virus K244, Klebsiella virus Kp2, Klebsiella virus KP34, Klebsiella virus KPRio2015, Klebsiella virus KpS2, Klebsiella virus KpV41, Klebsiella virus KpV48, Klebsiella virus KpV71, Klebsiella virus KpV74, Klebsiella virus KpV475, Klebsiella virus KPV811, Klebsiella virus myPSH1235, Klebsiella virus SU503, Klebsiella virus SU552A, Shigella virus SFN6B, Enterobacter virus KDA1, Proteus virus PM16, Proteus virus PM75, Dickeya virus Dagda, Dickeya virus Katbat, Dickeya virus Luksen, Dickeya virus Mysterion, Yersinia virus AP10, Erwinia virus FE44, Escherichia virus 285P, Escherichia virus BA14, Escherichia virus P483, Escherichia virus P694, Escherichia virus S523, Kluyvera virus Kvp1, Pectobacterium virus PP74, Salmonella virus BP12A, Salmonella virus BSP161, Shigella virus A7, Yersinia virus Berlin, Yersinia virus PYPS50, Yersinia virus Yepe2, Yersinia virus Yepf, Citrobacter virus CR8, Vibrio virus ICP3, Vibrio virus N4, Vibrio virus VP4, Enterobacter virus Eapa, Erwinia virus L1, Escherichia virus SRT7, Pseudomonas virus 17A, Pseudomonas virus ghl, Pseudomonas virus Henninger, Pseudomonas virus KNP, Pseudomonas virus Pf1ERZ2017, Pseudomonas virus PhiPSA2, Pseudomonas virus PhiPsa17, Pseudomonas virus PPPL1, Pseudomonas virus sh12, Pseudomonas virus WRT, Yersinia virus fPS9, Yersinia virus fPS53, Yersinia virus fPS59, Yersinia virus fPS54ocr, Pectobacterium virus Jarilo, Citrobacter virus CR44b, Citrobacter virus SH3, Citrobacter virus SH4, Cronobacter virus Dev2, Cronobacter virus GW1, Enterobacter virus EcpYZU01, Escherichia virus EcoDS1, Escherichia virus F, Escherichia virus GA2A, Escherichia virus IMM002, Escherichia virus K1F, Escherichia virus LM33P1, Escherichia virus PE3-1, Escherichia virus Ro451w, Escherichia virus ST31, Escherichia virus Vec13, Escherichia virus YZ1, Escherichia virus ZG49, Shigella virus SFPH2, Morganella virus MmP1, Morganella virus MP2, Dickeya virus JA10, Dickeya virus Ninurta, Pectobacterium virus PP47, Pectobacterium virus PP81, Pectobacterium virus PPWS4, Pseudomonas virus PPpW4, Pseudomonas virus 22PfluR64PP, Pseudomonas virus IBBPF7A, Pseudomonas virus Pf10, Pseudomonas virus PFP1, Pseudomonas virus PhiS1, Pseudomonas virus UNOSLW1, Pseudomonas virus PspYZU08, Escherichia virus K30, Klebsiella virus 2044-307w, Klebsiella virus BIS33, Klebsiella virus Henu1, Klebsiella virus IL33, Klebsiella virus IME205, Klebsiella virus IME321, Klebsiella virus K5, Klebsiella virus K11, Klebsiella virus K5-2, Klebsiella virus K5-4, Klebsiella virus KN1-1, Klebsiella virus KN3-1, Klebsiella virus KN4-1, Klebsiella virus Kp1, Klebsiella virus KP32, Klebsiella virus KP32i192, Klebsiella virus KP32i194, Klebsiella virus KP32i195, Klebsiella virus KP32i196, Klebsiella virus kpssk3, Klebsiella virus KpV289, Klebsiella virus KpV763, Klebsiella virus KpV766, Klebsiella virus KpV767, Klebsiella virus Pharr, Klebsiella virus PRA33, Klebsiella virus SHKp152234, Klebsiella virus SHKp152410, Citrobacter virus CFP1, Citrobacter virus SH1, Citrobacter virus SH2, Enterobacter virus E2, Enterobacter virus E3, Enterobacter virus KPN3, Enterobacteria virus T7M, Escherichia virus ECA2, Escherichia virus LL2, Escherichia virus T3, Escherichia virus T3Luria, Leclercia virus 10164-302, Salmonella virus SG-JL2, Serratia virus 2050H2, Serratia virus SM9-3Y, Yersinia virus APS, Yersinia virus YeF10, Yersinia virus YeO3-12, Enterobacteria virus IME390, Escherichia virus 13a, Escherichia virus 64795ec1, Escherichia virus C5, Escherichia virus CICC80001, Escherichia virus Ebrios, Escherichia virus EG1, Escherichia virus HZ2R8, Escherichia virus HZP2, Escherichia virus N30, Escherichia virus NCA, Escherichia virus T7, Salmonella virus 3A8767, Salmonella virus Vi06, Stenotrophomonas virus IME15, Yersinia virus YpPY, Yersinia virus YpsPG, Pseudomonas virus Phi15, Pectobacterium virus DUPPII, Synechococcus virus SCBP42, Aquamicrobium virus P14, Ashivirus S45C4, Agrobacterium virus Atuph02, Agrobacterium virus Atuph03, Ralstonia virus Ap1, Ayaqvirus S45C18, Prochlorococcus virus SS120-1, Pseudomonas virus Andromeda, Pseudomonas virus Bf7, Escherichia virus J8-65, Escherichia virus Lidtsur, Prochlorococcus virus NATL1A7, Chosvirus KM23C739, Rhizobium virus RHEph02, Rhizobium virus RHEph08, Rhizobium virus RHEph09, Vibrio virus Cyclit, Escherichia virus PGT2, Escherichia virus PhiKT, Alteromonas virus H4-4, Foussvirus S46C10, Fussvirus S30C28, Escherichia virus ECBP5, Pectobacterium virus PP99, Ralstonia virus DURPI, Ralstonia virus RsoP1EGY, Synechococcus STIP37, Jalkavirus S08C159, Ralstonia virus RSB3, Kawavirus SWce1C56, Synechococcus virus SRIP1, Providencia virus PS3, Curvibacter virus P26059B, Ralstonia virus RSB2, Synechococcus virus SCBP2, Krakvirus S39C11, Podovirus Lau218, Pantoea virus LIMElight, Prochlorococcus virus PGSP1, Synechococcus virus SCBP3, Caulobacter virus Lullwater, Vibrio virus KF1, Vibrio virus KF2, Vibrio virus OWB, Vibrio virus VP93, Pseudomonas virus VSW3, Nohivirus S31C1, Oinezvirus S37C6, Rhizobium virus RHEph01, Pagavirus S05C849, Mesorhizobium virus Lo5R7ANS, Pedosvirus S28C3, Pekhitvirus S04C24, Pelagibacter virus HTVC019P, Pelagivirus S35C6, Caulobacter virus Percy, Delftia virus IMEDE1, Podivirus S05C243, Pseudomonas virus PollyC, Synechococcus virus SCBP4, Powvirus S08C41, Xanthomonas virus f20, Xanthomonas virus f30, Xanthomonas virus XAJ24, Xanthomonas virus Xc10, Xylella virus Prado, Synechococcus virus SB28, Sphingomonas virus Scott, Synechococcus virus SRIP2, Ralstonia virus ITL1, Sieqvirus S42C7, Ralstonia virus RPSC1, Stopalavirus S38C3, Pelagibacter virus HTVC011P, Stupnyavirus KM16C193, Prochlorococcus virus 951510a, Prochlorococcus virus NATL2A133, Prochlorococcus virus PSSP10, Vibrio virus JSF7, Prochlorococcus virus PSSP7, Synechococcus virus P60, Prochlorococcus virus PSSP3, Synechococcus virus PSSP2, Synechococcus virus Syn5, Votkovvirus S28C10, Pantoea virus LIMEzero, Pasteurella virus PHB01, Pasteurella virus PHB02, Escherichia virus GJ1, Escherichia virus ST32, Erwinia virus Faunus, Erwinia virus Y2, Aeromonas virus pAh6C, Pectobacterium virus PM1, Pectobacterium virus PP101, Shewanella virus Spp001, Shewanella virus SppYZU05, Vibrio virus Ceto, Vibrio virus Thalassa, Vibrio virus JSF10, Vibrio virus JSF12, Vibrio virus phi3, Vibrio virus pVp1, Escherichia virus EPS7, Escherichia virus mar003J3, Escherichia virus saus132, Salmonella virus 123, Salmonella virus 329, Salmonella virus 118970sa12, Salmonella virus LVR16A, Salmonella virus S113, Salmonella virus S114, Salmonella virus S116, Salmonella virus S124, Salmonella virus S126, Salmonella virus S132, Salmonella virus S133, Salmonella virus S147, Salmonella virus Seafire, Salmonella virus SH9, Salmonella virus STG2, Salmonella virus Stitch, Salmonella virus Sw2, Yersinia virus phiR201, Escherichia virus AKFV33, Escherichia virus BF23, Escherichia virus chee24, Escherichia virus DT5712, Escherichia virus DT57C, Escherichia virus FFH1, Escherichia virus Gostya9, Escherichia virus H8, Escherichia virus mar004NP2, Escherichia virus OSYSP, Escherichia virus phiAPCEc03, Escherichia virus phiLLS, Escherichia virus s1ur09, Escherichia virus T5, Salmonella virus NR01, Salmonella virus S131, Salmonella virus Shivani, Salmonella virus SP01, Salmonella virus SP3, Salmonella virus SPC35, Shigella virus SHSML45, Shigella virus SSP1, Pectobacterium virus DUPPV, Pectobacterium virus My1, Proteus virus PM135, Proteus virus Stubb, Vibrio virus PG07, Vibrio virus VspSw1, Aeromonas virus AhSzq1, Aeromonas virus AhSzw1, Klebsiella virus IME260, Klebsiella virus Sugarland, Escherichia virus IME542, Escherichia virus ACGM12, Escherichia virus EC3a, Escherichia virus DTL, Escherichia virus IME253, Escherichia virus Rtp, Shigella virus Sf12, Escherichia virus phiEB49, Escherichia virus AHP42, Escherichia virus AHS24, Escherichia virus AKS96, Escherichia virus C119, Escherichia virus E41c, Escherichia virus Eb49, Escherichia virus Jk06, Escherichia virus KP26, Escherichia virus phiJLA23, Escherichia virus Rogue1, Shigella virus Sd1, Shigella virus pSf1, Citrobacter virus DK2017, Citrobacter virus Sazh, Citrobacter virus Stevie, Escherichia virus LL5, Escherichia virus TLS, Salmonella virus 36, Salmonella virus PHB07, Salmonella virus phSE2, Salmonella virus SP126, Salmonella virus YSP2, Escherichia virus 95, Escherichia virus mar001J1, Escherichia virus mar002J2, Escherichia virus SECphi27, Escherichia virus swan01, Escherichia virus IME347, Escherichia virus SRT8, Escherichia virus ADB2, Escherichia virus BIFF, Escherichia virus IME18, Escherichia virus JMPW1, Escherichia virus JMPW2, Escherichia virus SH2, Escherichia virus T1, Shigella virus 008, Shigella virus ISF001, Shigella virus PSf2, Shigella virus Sfin1, Shigella virus SH6, Shigella virus Shfl1, Shigella virus ISF002, Cronobacter virus Esp2949-1, Enterobacter virus EcL1, Cronobacter virus PhiCS01, Escherichia virus ESCO41, Pantoea virus AAS23, Escherichia virus NBD2, Enterobacter virus F20, Klebsiella virus 1513, Klebsiella virus GHK3, Klebsiella virus KLPN1, Klebsiella virus KOX1, Klebsiella virus KP36, Klebsiella virus KpCol1, Klebsiella virus KpKT2lphi1, Klebsiella virus KPN N141, Klebsiella virus KpV522, Klebsiella virus MezzoGao, Klebsiella virus NJR15, Klebsiella virus NJS1, Klebsiella virus NJS2, Klebsiella virus PKP126, Klebsiella virus Sushi, Klebsiella virus TAH8, Klebsiella virus TSK1, Bacillus virus Agate, Bacillus virus Bobb, Bacillus virus Bp8pC, Bacillus virus Bastille, Bacillus virus CAM003, Bacillus virus Evoli, Bacillus virus HoodyT, Bacillus virus AvesoBmore, Bacillus virus B4, Bacillus virus Bigbertha, Bacillus virus Riley, Bacillus virus Spock, Bacillus virus Troll, Bacillus virus Bc431, Bacillus virus Bcp1, Bacillus virus BCP82, Bacillus virus BM15, Bacillus virus Deepblue, Bacillus virus JBP901, Bacillus virus Grass, Bacillus virus NIT1, Bacillus virus SPG24, Bacillus virus BCP78, Bacillus virus TsarBomba, Bacillus virus BPS13, Bacillus virus BPS10C, Bacillus virus Hakuna, Bacillus virus Megatron, Bacillus virus WPh, Bacillus virus Mater, Bacillus virus Moonbeam, Bacillus virus SIOphi, Enterococcus virus ECP3, Enterococcus virus EF24C, Enterococcus virus EFLK1, Enterococcus virus EFDG1, Enterococcus virus EFP01, Enterococcus virus EfV12, Listeria virus A511, Listeria virus AG20, Listeria virus List36, Listeria virus LMSP25, Listeria virus LMTA34, Listeria virus LMTA148, Listeria virus LP048, Listeria virus LP064, Listeria virus LP083-2, Listeria virus P100, Listeria virus WILL Bacillus virus Camphawk, Bacillus virus SPO1, Bacillus virus CP51, Bacillus virus JL, Bacillus virus Shanette, Staphylococcus virus BS1, Staphylococcus virus BS2, Lactobacillus virus Bacchae, Lactobacillus virus Bromius, Lactobacillus virus Iacchus, Lactobacillus virus Lpa804, Lactobacillus virus Semele, Staphylococcus virus G1, Staphylococcus virus G15, Staphylococcus virus JD7, Staphylococcus virus K, Staphylococcus virus MCE2014, Staphylococcus virus P108, Staphylococcus virus Rodi, Staphylococcus virus S253, Staphylococcus virus S25-4, Staphylococcus virus SA12, Staphylococcus virus Sb1, Staphylococcus virus SscM1, Staphylococcus virus IPLAC1C, Staphylococcus virus SEP1, Staphylococcus virus Remus, Staphylococcus virus SA11, Staphylococcus virus Stau2, Staphylococcus virus Twort, Brochothrix virus A9, Lactobacillus virus Lb338-1, Lactobacillus virus LP65, Campylobacter virus CP21, Campylobacter virus CP220, Campylobacter virus CPt10, Campylobacter virus IBB35, Campylobacter virus CP81, Campylobacter virus CP30A, Campylobacter virus CPX, Campylobacter virus Los1, Campylobacter virus NCTC12673, Escherichia virus Alf5, Escherichia virus AYO145A, Escherichia virus EC6, Escherichia virus HY02, Escherichia virus JH2, Escherichia virus TP1, Escherichia virus VpaE1, Escherichia virus wV8, Salmonella virus BPS15Q2, Salmonella virus BPS17L1, Salmonella virus BPS17W1, Salmonella virus FelixO1, Salmonella virus Mushroom, Salmonella virus Si3, Salmonella virus SP116, Salmonella virus UAB87, Erwinia virus Ea214, Erwinia virus M7, Citrobacter virus Moogle, Citrobacter virus Mordin, Shigella virus Sf13, Shigella virus Sf14, Shigella virus Sf17, Escherichia virus SUSP1, Escherichia virus SUSP2, Ralstonia virus RSA1, Ralstonia virus RSY1, Mannheimia virus 1127AP1, Mannheimia virus PHL101, Aeromonas virus phiO18P, Vibrio virus Canoe, Pseudoalteromonas virus C5a, Pseudomonas virus Dobby, Pseudomonas virus phiCTX, Erwinia virus EtG, Escherichia virus 186, Salmonella virus PsP3, Salmonella virus SEN1, Erwinia virus ENT90, Klebsiella virus 4LV2017, Salmonella virus Fels2, Salmonella virus RE2010, Salmonella virus SEN8, Salmonella virus SopEphi, Haemophilus virus HP1, Haemophilus virus HP2, Vibrio virus Kappa, Pasteurella virus F108, Burkholderia virus KS14, Burkholderia virus AP3, Burkholderia virus KS5, Vibrio virus K139, Burkholderia virus ST79, Escherichia virus fiAA91ss, Escherichia virus P2, Escherichia virus pro147, Escherichia virus pro483, Escherichia virus Wphi, Yersinia virus L413C, Pseudomonas virus phi3, Salinivibrio virus SMHB1, Klebsiella virus 3LV2017, Salmonella virus SEN4, Cronobacter virus ESSI2, Stenotrophomonas virus Smp131, Salmonella virus FSLSP004, Burkholderia virus KL3, Burkholderia virus phi52237, Burkholderia virus phiE122, Burkholderia virus phiE202, Vibrio virus PV94, Escherichia virus P88, Escherichia virus Bp7, Escherichia virus IME08, Escherichia virus JS10, Escherichia virus J598, Escherichia virus MX01, Escherichia virus QL01, Escherichia virus VR5, Escherichia virus WG01, Escherichia virus VR7, Escherichia virus VR20, Escherichia virus VR25, Escherichia virus VR26, Shigella virus SP18, Salmonella virus Melville, Salmonella virus S16, Salmonella virus STML198, Salmonella virus STP4a, Klebsiella virus JD18, Klebsiella virus PKO111, Enterobacter virus PG7, Escherichia virus CC31, Escherichia virus ECD7, Escherichia virus GEC3S, Escherichia virus JSE, Escherichia virus phi1, Escherichia virus RB49, Citrobacter virus CF1, Citrobacter virus Merlin, Citrobacter virus Moon, Escherichia virus APCEc01, Escherichia virus HP3, Escherichia virus HX01, Escherichia virus JS09, Escherichia virus 0157tp3, Escherichia virus 0157tp6, Escherichia virus PhAPEC2, Escherichia virus RB69, Escherichia virus ST0, Shigella virus SHSML521, Shigella virus UTAM, Vibrio virus KVP40, Vibrio virus nt1, Vibrio virus ValKK3, Enterobacter virus Eap3, Klebsiella virus KP15, Klebsiella virus KP27, Klebsiella virus Matisse, Klebsiella virus Miro, Klebsiella virus PMBT1, Escherichia virus AR1, Escherichia virus C40, Escherichia virus CF2, Escherichia virus E112, Escherichia virus ECML134, Escherichia virus HY01, Escherichia virus HY03, Escherichia virus Ime09, Escherichia virus RB3, Escherichia virus RB14, Escherichia virus s1ur03, Escherichia virus slur04, Escherichia virus T4, Shigella virus Pss1, Shigella virus Sf21, Shigella virus Sf22, Shigella virus Sf24, Shigella virus SHBML501, Shigella virus Shf12, Yersinia virus D1, Yersinia virus PST, Acinetobacter virus 133, Aeromonas virus 65, Aeromonas virus Aeh1, Escherichia virus RB16, Escherichia virus RB32, Escherichia virus RB43, Pseudomonas virus 42, Escherichia virus Av05, Cronobacter virus CR3, Cronobacter virus CR8, Cronobacter virus CR9, Cronobacter virus PBES02, Pectobacterium virus phiTE, Cronobacter virus GAP31, Escherichia virus 4MG, Salmonella virus PVPSE1, Salmonella virus SSE121, Escherichia virus APECc02, Escherichia virus FFH2, Escherichia virus FV3, Escherichia virus JES2013, Escherichia virus Murica, Escherichia virus s1ur16, Escherichia virus V5, Escherichia virus V18, Brevibacillus virus Abouo, Brevibacillus virus Davies, Synechococcus virus SMbCM100, Erwinia virus Deimos, Erwinia virus Desertfox, Erwinia virus Ea35-70, Erwinia virus RAY, Erwinia virus Simmy50, Erwinia virus SpecialG, Synechococcus virus SShM2, Klebsiella virus K64-1, Klebsiella virus RaK2, Dickeya virus AD1, Erwinia virus Alexandra, Lactobacillus virus LBR48, Synechococcus virus SCAM1, Synechococcus virus SCBWM1, Vibrio virus Aphrodite1, Escherichia virus 121Q, Eschierichia virus PBECO4, Synechococcus virus AC2014fSyn7803C8, Synechococcus virus ACG2014f, Synechococcus virus ACG2014fSyn7803US26, Synechococcus virus STIMS, Pseudomonas virus PaBG, Rheinheimera virus Barba18A, Rheinheimera virus Barba19A, Rheinheimera virus Barba21A, Rheinheimera virus Barba5S, Rheinheimera virus Barba8S, Burkholderia virus BcepMu, Burkholderia virus phiE255, Synechococcus virus Bellamy, Gordonia virus GMA6, Aeromonas virus 44RR2, Mycobacterium virus Alice, Mycobacterium virus Bxz1, Mycobacterium virus Dandelion, Mycobacterium virus HyRo, Mycobacterium virus 13, Mycobacterium virus Lukilu, Mycobacterium virus Nappy, Mycobacterium virus Sebata, Faecalibacterium virus Brigit, Prochlorococcus virus Syn33, Synechococcus virus SRIM12-01, Synechococcus virus SRIM12-06, Synechococcus virus SRIM12-08, Salmonella virus SEN34, Acidovorax virus ACP17, Xanthomonas virus Carpasina, Xanthomonas virus XcP1, Pseudomonas virus pf16, Synechococcus virus SCAM3, Ralstonia virus RSF1, Ralstonia virus RSL2, Synechococcus virus SWAM2, Erwinia virus Derbicus, Pseudomonas virus EL, Sinorhizobium virus M7, Sinorhizobium virus M12, Sinorhizobium virus N3, Serratia virus BF, Yersinia virus Yen9-04, Faecalibacterium virus Epona, Erwinia virus Asesino, Erwinia virus EaH2, Prochlorococcus virus MED4-213, Prochlorococcus virus PHM1, Prochlorococcus virus PHM2, Flavobacterium virus FCL2, Flavobacterium virus FCV1, Pseudomonas virus KIL2, Pseudomonas virus KIL4, Edwardsiella virus GF2, Escherichia virus Goslar, Halomonas virus HAP1, Vibrio virus VP882, Lactobacillus virus Lb, Erwinia virus EaH1, Iodobacter virus PLPE, Delftia virus PhiW14, Klebsiella virus JD001, Klebsiella virus KpV52, Klebsiella virus KpV80, Escherichia virus CVM10, Escherichia virus EC0078, Escherichia virus ep3, Brevibacillus virus Jimmer, Brevibacillus virus Osiris, Synechococcus virus SCAMS, Rhizobium virus RHEph4, Faecalibacterium virus Lagaffe, Synechoccus virus SP4, Synechococcus virus Syn30, Prochlorococcus virus PTIM40, Synechococcus virus SSKS1, Salmonella virus ZCSE2, Clostridium virus phiC2, Clostridium virus phiCD27, Clostridium virus phiCD119, Erwinia virus Machina, Arthrobacter virus BarretLemon, Arthrobacter virus Beans, Arthrobacter virus Brent, Arthrobacter virus Jawnski, Arthrobacter virus Martha, Arthrobacter virus Piccoletto, Arthrobacter virus Shade, Arthrobacter virus Sonny, Synechococcus virus SCAM7, Acinetobacter virus ME3, Ralstonia virus RSL1, Cronobacter virus GAP32, Pectinobacterium virus CBB, Faecalibacterium virus Mushu, Escherichia virus Mu, Shigella virus SfMu, Halobacterium virus phiH, Burkholderia virus Bcepl, Burkholderia virus Bcep43, Burkholderia virus Bcep781, Burkholderia virus BcepNY3, Xanthomonas virus OP2, Synechococcus virus SMbCM6, Pseudomonas virus Ab03, Pseudomonas virus G1, Pseudomonas virus KPP10, Pseudomonas virus PAKP3, Pseudomonas virus PS24, Synechococcus virus SRIM8, Synechococcus virus SRIM50, Synechococcus virus ACG2014bSyn7803C61, Synechococcus virus ACG2014bSyn9311C4, Synechococcus virus SRIM2, Synechococcus virus SPM2, Pseudomonas virus Noxifer, Acinetobacter virus AB1, Acinetobacter virus AB2, Acinetobacter virus AbC62, Acinetobacter virus AbP2, Acinetobacter virus AP22, Acinetobacter virus LZ35, Acinetobacter virus WCHABP1, Acinetobacter virus WCHABP12, Pseudomonas virus Psa374, Pseudomonas virus VCM, Pseudomonas virus CAb 1, Pseudomonas virus CAb02, Pseudomonas virus JG004, Pseudomonas virus MAGI, Pseudomonas virus PA10, Pseudomonas virus PAKP1, Pseudomonas virus PAKP2, Pseudomonas virus PAKP4, Pseudomonas virus PaP1, Pseudomonas virus phiMK, Pseudomonas virus Zigelbrucke, Prochlorococcus virus PSSM7, Burkholderia virus BcepF1, Pseudomonas virus 141, Pseudomonas virus Ab28, Pseudomonas virus CEBDP1, Pseudomonas virus DL60, Pseudomonas virus DL68, Pseudomonas virus E215, Pseudomonas virus E217, Pseudomonas virus F8, Pseudomonas virus JG024, Pseudomonas virus KPP12, Pseudomonas virus KTN6, Pseudomonas virus LBL3, Pseudomonas virus LMA2, Pseudomonas virus NH4, Pseudomonas virus PA5, Pseudomonas virus PB1, Pseudomonas virus PS44, Pseudomonas virus SN, Pectinobacterium virus PEAT2, Edwardsiella virus pEtSU, Bordetella virus PHB04, Escherichia phage ESCO13, Escherichia virus ESCO5, Escherichia virus phAPEC8, Escherichia virus Schickermooser, Klebsiella virus ZCKP1, Pseudomonas virus PA7, Pseudomonas virus phiKZ, Pseudomonas virus SL2, Pseudomonas virus PMW, Agrobacterium virus Atuph07, Synechococcus virus Syn19, Aeromonas virus 56, Aeromonas virus 43, Escherichia virus P1, Escherichia virus RCS47, Salmonella virus SJ46, Pseudoalteromonas virus J2-1, Arthrobacter virus ArV1, Arthrobacter virus Colucci, Arthrobacter virus Trina, Ralstonia virus RP12, Erwinia virus Risingsun, Salmonella virus BP63, Acinetobacter virus Aci05, Acinetobacter virus Aci01-1, Acinetobacter virus Aci02-2, Prochlorococcus virus PSSM2, Dickeya virus JA11, Dickeya virus JA29, Erwinia virus Y3, Agrobacterium virus 7-7-1, Salmonella virus SPN3US, Bacillus virus Shbh1, Bacillus virus 1, Geobacillus virus GBSV1, Pseudomonas virus tabernarius, Synechococcus virus ST4, Faecalibacterium virus Taranis, Synechococcus virus SIOM18, Yersinia virus R1RT, Yersinia virus TG1, Synechococcus virus STIM4, Synechococcus virus SSM1, Bacillus virus SP15, Vibrio virus pTD1, Vibrio virus VP4B, Tetrasphaera virus TJEL Faecalibacterium virus Toutatis, Aeromonas virus 25, Aeromonas virus Aes12, Aeromonas virus Aes508, Aeromonas virus AS4, Aeromonas virus Asgz, Stenotrophomonas virus IME13, Prochlorococcus virus Syn1, Synechococcus virus SRIM44, Vibrio virus MAR, Vibrio virus VHML, Vibrio virus VP585, Escherichia virus ECML4, Salmonella virus Marshall, Salmonella virus Maynard, Salmonella virus SJ2, Salmonella virus STML131, Salmonella virus ViI, Erwinia virus Wellington, Escherichia virus ECML-117, Escherichia virus FEC19, Escherichia virus WFC, Escherichia virus WFH, Serratia virus CHI14, Edwardsiella virus MSW3, Edwardsiella virus PEi21, Erwinia virus Yoloswag, Bacillus virus G, Bacillus virus PBS1, Microcystis virus Ma-LMM01, Streptococcus virus Cp1, Streptococcus virus Cp1, Lactococcus virus WP2, Bacillus virus B103, Bacillus virus GA1, Bacillus virus phi29, Kurthia virus 6, Actinomyces virus Av1, Mycoplasma virus P1, Staphylococcus virus Andhra, Staphylococcus virus St134, Staphylococcus virus 66, Staphylococcus virus 44AHJD, Staphylococcus virus BP39, Staphylococcus virus CSA13, Staphylococcus virus GRCS, Staphylococcus virus Pabna, Staphylococcus virus phiAGO13, Staphylococcus virus PSa3, Staphylococcus virus S24-1, Staphylococcus virus SAP2, Staphylococcus virus SCH1, Staphylococcus virus SLPW, Shigella virus 7502Stx, Shigella virus POCJ13, Escherichia virus 191, Escherichia virus PA2, Escherichia virus TL2011, Shigella virus VASD, Escherichia virus 24B, Escherichia virus 933W, Escherichia virus Min27, Escherichia virus PA28, Escherichia virus Stx2 II, Dinoroseobacter virus DFL12, Pseudomonas virus Bjorn, Pseudomonas virus Ab22, Pseudomonas virus CHU, Pseudomonas virus LUZ24, Pseudomonas virus PAA2, Pseudomonas virus PaP3, Pseudomonas virus PaP4, Pseudomonas virus TL, Vibrio virus VC8, Vibrio virus VP2, Vibrio virus VP5, Escherichia virus N4, Flavobacterium virus Fpv1, Flavobacterium virus Fpv4, Streptococcus virus C1, Escherichia virus APEC5, Escherichia virus APEC7, Escherichia virus Bp4, Escherichia virus EC1UPM, Escherichia virus ECBP1, Escherichia virus G7C, Escherichia virus IME11, Shigella virus Sb1, Escherichia virus C1302, Pseudomonas virus F116, Pseudomonas virus H66, Escherichia virus Pollock, Salmonella virus FSL SP-058, Salmonella virus FSL SP-076, Arthrobacter virus Adat, Arthrobacter virus Jasmine, Erwinia virus Ea9-2, Erwinia virus Frozen, Achromobacter virus Axp3, Achromobacter virus JWAlpha, Edwardsiella virus KF1, Burkholderia virus KL4, Pseudomonas virus KPP25, Pseudomonas virus R18, Pseudomonas virus tf, Escherichia virus 172-1, Escherichia virus ECB2, Escherichia virus NJ01, Escherichia virus phiEco32, Escherichia virus Septima11, Escherichia virus SU10, Escherichia virus HK620, Salmonella virus BTP1, Salmonella virus P22, Salmonella virus SE1Spa, Salmonella virus ST64T, Shigella virus Sf6, Burkholderia virus Bcep22, Burkholderia virus Bcepi102, Burkholderia virus Bcepmigl, Burkholderia virus DC1, Cellulophaga virus Cba41, Cellulophaga virus Cba172, Pseudomonas virus Ab09, Pseudomonas virus LIT1, Pseudomonas virus PA26, Pseudomonas virus KPP21, Pseudomonas virus LUZ7, Vibrio virus 48B1, Vibrio virus 51A6, Vibrio virus 51A7, Vibrio virus 52B1, Myxococcus virus Mx8, Bacillus virus Page, Bacillus virus Palmer, Bacillus virus Pascal, Bacillus virus Pony, Bacillus virus Pookie, Brucella virus Pr, Brucella virus Tb, Bordetella virus BPP1, Burkholderia virus BcepC6B, Helicobacter virus 1961P, Helicobacter virus KHP30, Helicobacter virus KHP40, Pseudomonas virus phCDa, Escherichia virus Skarpretter, Escherichia virus Sortsne, Klebsiella virus IME279, Escherichia virus phiV10, Salmonella virus Epsilon15, Salmonella virus SPN1S, Pseudomonas virus NV1, Pseudomonas virus UFVP2, Escherichia virus PTXU04, Hamiltonella virus APSE1, Lactococcus virus KSY1, Phormidium virus WMP3, Phormidium virus WMP4, Pseudomonas virus 119X, Roseobacter virus SIO1, Vibrio virus VpV262, Streptomyces virus ELB20, Streptomyces virus R4, Streptomyces virus Amela, Streptomyces virus phiCAM, Streptomyces virus Aaronocolus, Streptomyces virus Caliburn, Streptomyces virus Danzina, Streptomyces virus Hydra, Streptomyces virus Izzy, Streptomyces virus Lannister, Streptomyces virus Lika, Streptomyces virus Sujidade, Streptomyces virus Zemlya, Streptomyces virus phiHau3, Mycobacterium virus Acadian, Mycobacterium virus Baee, Mycobacterium virus Reprobate, Mycobacterium virus Adawi, Mycobacterium virus Banel, Mycobacterium virus BrownCNA, Mycobacterium virus Chrisnmich, Mycobacterium virus Cooper, Mycobacterium virus JAMaL, Mycobacterium virus Nigel, Mycobacterium virus Stinger, Mycobacterium virus Vincenzo, Mycobacterium virus Zemanar, Mycobacterium virus Apizium, Mycobacterium virus Manad, Mycobacterium virus Oline, Mycobacterium virus Osmaximus, Mycobacterium virus Pg1, Mycobacterium virus Soto, Mycobacterium virus Suffolk, Mycobacterium virus Athena, Mycobacterium virus Bernardo, Mycobacterium virus Gadjet, Mycobacterium virus Pipefish, Mycobacterium virus Godines, Mycobacterium virus Rosebush, Mycobacterium virus TA17a, Mycobacterium virus Babsiella, Mycobacterium virus Brujita, Mycobacterium virus Hawkeye, Mycobacterium virus Plot, Caulobacter virus CcrBL9, Caulobacter virus CcrSC, Caulobacter virus CcrColossus, Caulobacter virus CcrPW, Caulobacter virus CcrBL10, Caulobacter virus CcrRogue, Caulobacter virus phiCbK, Caulobacter virus Swift, Salmonella virus SP31, Salmonella virus AG11, Salmonella virus Ent1, Salmonella virus f18SE, Salmonella virus Jersey, Salmonella virus L13, Salmonella virus LSPA1, Salmonella virus SE2, Salmonella virus SETP3, Salmonella virus SETP7, Salmonella virus SETP13, Salmonella virus SP101, Salmonella virus SS3e, Salmonella virus wks13, Escherichia virus K1G, Escherichia virus K1H, Escherichia virus Klind1, Escherichia virus Klind2, Esherichia virus Golestan, Raoultella virus RP180, Gordonia virus Asapag, Gordonia virus BENtherdunthat, Gordonia virus Getalong, Gordonia virus Kenna, Gordonia virus Horus, Gordonia virus Phistory, Leuconostoc virus Lmd1, Leuconostoc virus LN03, Leuconostoc virus LN04, Leuconostoc virus LN12, Leuconostoc virus LN6B, Leuconostoc virus P793, Leuconostoc virus 1A4, Leuconostoc virus Ln8, Leuconostoc virus Ln9, Leuconostoc virus LN25, Leuconostoc virus LN34, Leuconostoc virus LNTR3, Mycobacterium virus Bongo, Mycobacterium virus Rey, Mycobacterium virus Butters, Mycobacterium virus Michelle, Mycobacterium virus Charlie, Mycobacterium virus Pipsqueaks, Mycobacterium virus Xeno, Mycobacterium virus Panchino, Mycobacterium virus Phrann, Mycobacterium virus Redi, Mycobacterium virus Skinnyp, Gordonia virus BaxterFox, Gordonia virus Yeezy, Gordonia virus Kita, Gordonia virus Nymphadora, Gordonia virus Zirinka, Mycobacterium virus Bignuz, Mycobacterium virus Brusacoram, Mycobacterium virus Donovan, Mycobacterium virus Fishburne, Mycobacterium virus Jebeks, Mycobacterium virus Malithi, Mycobacterium virus Phayonce, Lactobacillus virus B2, Lactobacillus virus Lenus, Lactobacillus virus Nyseid, Lactobacillus virus SAC12, Lactobacillus virus Ldl1, Lactobacillus virus ViSo2018a, Lactobacillus virus Maenad, Lactobacillus virus P1, Lactobacillus virus Satyr, Streptomyces virus AbbeyMikolon, Pseudomonas virus Ab18, Pseudomonas virus Ab19, Pseudomonas virus PaMx11, Burkholderia virus AH2, Arthrobacter virus Amigo, Arthrobacteria virus Molivia, Propionibacterium virus Anatole, Propionibacterium virus B3, Arthrobacter virus Andrew, Bacillus virus Andromeda, Bacillus virus Blastoid, Bacillus virus Curly, Bacillus virus Eoghan, Bacillus virus Finn, Bacillus virus Glittering, Bacillus virus Riggi, Bacillus virus Taylor, Microbacterium virus Appa, Gordonia virus Apricot, Microbacterium virus Armstrong, Gordonia virus Attis, Streptomyces virus Attoomi, Streptomyces virus Austintatious, Streptomyces virus Ididsumtinwong, Streptomyces virus PapayaSalad, Gordonia virus Bantam, Mycobacterium virus Barnyard, Mycobacterium virus Konstantine, Mycobacterium virus Predator, Pseudomonas virus B3, Pseudomonas virus JBD67, Pseudomonas virus JD18, Pseudomonas virus PM105, Mycobacterium virus Bernal13, Gordonia virus BetterKatz, Streptomyces virus Bing, Staphylococcus virus 13, Staphylococcus virus 77, Staphylococcus virus 108PVL, Gordonia virus Bowser, Arthrobacter virus Bridgette, Arthrobacter virus Constance, Arthrobacter virus Eileen, Arthrobacter virus Judy, Arthrobacter virus Peas, Gordonia virus Britbrat, Mycobacterium virus Bron, Mycobacterium virus Faith1, Mycobacterium virus JoeDirt, Mycobacterium virus Rumpelstiltskin, Streptococcus virus 858, Streptococcus virus 2972, Streptococcus virus ALQ132, Streptococcus virus 01205, Streptococcus virus Sfi11, Pseudomonas virus D3112, Pseudomonas virus DMS3, Pseudomonas virus FHA0480, Pseudomonas virus LPB1, Pseudomonas virus MP22, Pseudomonas virus MP29, Pseudomonas virus MP38, Pseudomonas virus PA1KOR, Cellulophaga virus ST, Bacillus virus 250, Bacillus virus IEBH, Lactococcus virus bIL67, Lactococcus virus c2, Corynebacterium virus C3PO, Corynebacterium virus Darwin, Corynebacterium virus Zion, Lactobacillus virus c5, Lactobacillus virus Ld3, Lactobacillus virus Ld17, Lactobacillus virus Ld25A, Lactobacillus virus LLKu, Lactobacillus virus phiLdb, Mycobacterium virus Che9c, Mycobacterium virus Sbash, Mycobacterium virus Ardmore, Mycobacterium virus Avani, Mycobacterium virus Boomer, Mycobacterium virus Che8, Mycobacterium virus Che9d, Mycobacterium virus DeadP, Mycobacterium virus Dlane, Mycobacterium virus Dorothy, Mycobacterium virus DotProduct, Mycobacterium virus Drago, Mycobacterium virus Fruitloop, Mycobacterium virus GUmbie, Mycobacterium virus Ibhubesi, Mycobacterium virus Llij, Mycobacterium virus Mozy, Mycobacterium virus Mutaforma13, Mycobacterium virus Pacc40, Mycobacterium virus PMC, Mycobacterium virus Ramsey, Mycobacterium virus RockyHorror, Mycobacterium virus SG4, Mycobacterium virus Shauna1, Mycobacterium virus Shilan, Mycobacterium virus Spartacus, Mycobacterium virus Taj, Mycobacterium virus Tweety, Mycobacterium virus Wee, Mycobacterium virus Yoshi, Salmonella virus Chi, Salmonella virus FSLSP030, Salmonella virus FSLSP088, Salmonella virus iEPS5, Salmonella virus SPN19, Corynebacterium virus P1201, Clavibacter virus CMP1, Clavibacter virus CN1A, Lactobacillus virus ATCC8014, Lactobacillus virus phiJL1, Pediococcus virus cIP1, Arthrobacter virus Coral, Arthrobacter virus Kepler, Mycobacterium virus Corndog, Mycobacterium virus Firecracker, Rhodobacter virus RcCronus, Gordonia virus DareDevil, Arthrobacter virus Decurro, Stenotrophomonas virus DLPS, Gordonia virus Demosthenes, Gordonia virus Katyusha, Gordonia virus Kvothe, Pseudomonas virus D3, Pseudomonas virus PMG1, Escherichia virus EK99P1, Escherichia virus HK578, Escherichia virus JL1, Escherichia virus SSL2009a, Escherichia virus YD2008s, Shigella virus EP23, Sodalis virus S01, Microbacterium virus Dismas, Propionibacterium virus B22, Propionibacterium virus Doucette, Propionibacterium virus E6, Propionibacterium virus G4, Microbacterium virus Eden, Enterococcus virus AL2, Enterococcus virus AL3, Enterococcus virus AUEF3, Enterococcus virus EcZZ2, Enterococcus virus EF3, Enterococcus virus EF4, Enterococcus virus EfaCPT1, Enterococcus virus IME196, Enterococcus virus LY0322, Enterococcus virus phiSHEF2, Enterococcus virus phiSHEF4, Enterococcus virus phiSHEF5, Enterococcus virus PMBT2, Enterococcus virus SANTOR1, Edwardsiella virus eiAU, Xanthomonas virus PhiL7, Microbacterium virus Eleri, Gordonia virus Cozz, Gordonia virus Emalyn, Gordonia virus GTE2, Gordonia virus Troje, Gordonia virus Eyre, Gordonia virus Fairfaxidumvirus, Microbacterium virus ISF9, Erwinia virus Eho49, Erwinia virus Eho59, Staphylococcus virus 2638A, Staphylococcus virus QT1, Colwellia virus 9A, Mycobacterium virus Alma, Mycobacterium virus Arturo, Mycobacterium virus Astro, Mycobacterium virus Backyardigan, Mycobacterium virus Benedict, Mycobacterium virus Bethlehem, Mycobacterium virus Billknuckles, Mycobacterium virus BPBiebs31, Mycobacterium virus Bruns, Mycobacterium virus Bxb 1, Mycobacterium virus Bxz2, Mycobacterium virus Che12, Mycobacterium virus Cuco, Mycobacterium virus D29, Mycobacterium virus Doom, Mycobacterium virus Ericb, Mycobacterium virus Euphoria, Mycobacterium virus George, Mycobacterium virus Gladiator, Mycobacterium virus Goose, Mycobacterium virus Hammer, Mycobacterium virus Heldan, Mycobacterium virus Jasper, Mycobacterium virus JC27, Mycobacterium virus Jeffabunny, Mycobacterium virus JHC117, Mycobacterium virus KBG, Mycobacterium virus Kssjeb, Mycobacterium virus Kugel, Mycobacterium virus L5, Mycobacterium virus Lesedi, Mycobacterium virus LHTSCC, Mycobacterium virus lockley, Mycobacterium virus Marcell, Mycobacterium virus Microwolf, Mycobacterium virus Mrgordo, Mycobacterium virus Museum, Mycobacterium virus Nepal, Mycobacterium virus Packman, Mycobacterium virus Peaches, Mycobacterium virus Perseus, Mycobacterium virus Pukovnik, Mycobacterium virus Rebeuca, Mycobacterium virus Redrock, Mycobacterium virus Ridgecb, Mycobacterium virus Rockstar, Mycobacterium virus Saintus, Mycobacterium virus Skipole, Mycobacterium virus Solon, Mycobacterium virus Switzer, Mycobacterium virus SWU1, Mycobacterium virus Tiger, Mycobacterium virus Timshel, Mycobacterium virus Trixie, Mycobacterium virus Turbido, Mycobacterium virus Twister, Mycobacterium virus U2, Mycobacterium virus Violet, Mycobacterium virus Wonder, Mycobacterium virus Gaia, Arthrobacter virus Abidatro, Arthrobacter virus Galaxy, Gordonia virus GAL1, Gordonia virus GMA3, Gordonia virus Gsput1, Gordonia virus GMAT, Gordonia virus GTE7, Gordonia virus Ghobes, Mycobacterium virus Giles, Microbacterium virus OneinaGillian, Gordonia virus GodonK, Microbacterium virus Goodman, Arthrobacter virus Captnmurica, Arthrobacter virus Gordon, Gordonia virus GordTnk2, Proteus virus Isfahan, Gordonia virus Jumbo, Gordonia virus Gustav, Gordonia virus Mandia, Paenibacillus virus Harrison, Gordonia virus Hedwig, Cellulophaga virus Cba121, Cellulophaga virus Cba171, Cellulophaga virus Cba181, Escherichia virus HK022, Escherichia virus HK75, Escherichia virus HK97, Escherichia virus HK106, Escherichia virus HK446, Escherichia virus HK542, Escherichia virus HK544, Escherichia virus HK633, Escherichia virus mEp234, Escherichia virus mEpX1, Escherichia virus mEpX2, Streptomyces virus Hiyaa, Salinibacter virus M1EM1, Salinibacter virus M8CR30-2, Listeria virus LP26, Listeria virus LP37, Listeria virus LP110, Listeria virus LP114, Listeria virus P70, Corynebacterium virus phi673, Corynebacterium virus phi674, Microbacterium virus Hamlet, Microbacterium virus Ilzat, Polaribacter virus P12002L, Polaribacter virus P12002S, Nonlabens virus P12024L, Nonlabens virus P12024S, Gordonia virus Jace, Brevibacillus virus Jenst, Corynebacterium virus Juicebox, Salinibacter virus M31CR41-2, Salinibacter virus SRUTV1, Arthrobacter virus Kellezzio, Arthrobacter virus Kitkat, Burkholderia virus KL1, Xanthomonas virus CP1, Microbacterium virus Golden, Microbacterium virus Koji, Arthrobacter virus Bennie, Arthrobacter virus DrRobert, Arthrobacter virus Glenn, Arthrobacter virus HunterDalle, Arthrobacter virus Joann, Arthrobacter virus Korra, Arthrobacter virus Preamble, Arthrobacter virus Pumancara, Arthrobacter virus Wayne, Mycobacterium virus 244, Mycobacterium virus Bask21, Mycobacterium virus CJW1, Mycobacterium virus Eureka, Mycobacterium virus Kostya, Mycobacterium virus Porky, Mycobacterium virus Pumpkin, Mycobacterium virus Sirduracell, Mycobacterium virus Toto, Microbacterium virus Krampus, Salinibacter virus M8CC19, Salinibacter virus M8CRM1, Sphingobium virus Lacusarx, Escherichia virus DE3, Escherichia virus HK629, Escherichia virus HK630, Escherichia virus Lambda, Pseudomonas virus Lana, Arthrobacter virus Laroye, Eggerthella virus PMBT5, Arthobacter virus Liebe, Mycobacterium virus Halo, Mycobacterium virus Liefie, Acinetobacter virus IMEAB3, Acinetobacter virus Loki, Streptomyces virus phiBT1, Streptomyces virus phiC31, Brevibacterium virus LuckyBarnes, Gordonia virus Lucky10, Faecalibacterium virus Lugh, Bacillus virus BMBtp2, Bacillus virus TP21, Bacillus virus Mgbh1, Arthrobacter virus Maj a, Arthrobacter virus DrManhattan, Mycobacterium virus Ff47, Mycobacterium virus Muddy, Vibrio virus MAR10, Vibrio virus SSP002, Mycobacterium virus Marvin, Mycobacterium virus Mosmoris, Pseudomonas virus PMBT3, Microbacterium virus MementoMori, Microbacterium virus Fireman, Microbacterium virus Metamorphoo, Microbacterium virus RobsFeet, Microbacterium virus Min1, Streptococcus virus 7201, Streptococcus virus DT1, Streptococcus virus phiAbc2, Streptococcus virus Sfi19, Streptococcus virus Sfi21, Gordinia virus Birksandsocks, Gordonia virus Flakey, Gordonia virus Monty, Gordonia virus Stevefrench, Arthrobacter virus Circum, Arthrobacter virus Mudcat, Escherichia virus EC2, Salmonella virus Lumpael, Dinoroseobacter virus D5C, Burkholderia virus BcepNazgul, Microbacterium virus Neferthena, Pseudomonas virus nickie, Pseudomonas virus NP1, Pseudomonas virus PaMx25, Escherichia virus 9g, Escherichia virus JenK1, Escherichia virus JenP1, Escherichia virus JenP2, Salmonella virus SE1Kor, Salmonella virus 9NA, Salmonella virus SP069, Gordonia virus Nyceirae, Faecalibacterium virus Oengus, Mycobacterium virus Baka, Mycobacterium virus Courthouse, Mycobacterium virus Littlee, Mycobacterium virus Omega, Mycobacterium virus Optimus, Mycobacterium virus Thibault, Gordonia virus BrutonGaster, Gordonia virus OneUp, Gordonia virus Orchid, Thermus virus P23-45, Thermus virus P74-26, Propionibacterium virus ATCC29399BC, Propionibacterium virus ATCC29399BT, Propionibacterium virus Attacne, Propionibacterium virus Keiki, Propionibacterium virus Kubed, Propionibacterium virus Lauchelly, Propionibacterium virus MrAK, Propionibacterium virus Ouroboros, Propionibacterium virus P91, Propionibacterium virus P105, Propionibacterium virus P144, Propionibacterium virus P1001, Propionibacterium virus P1.1, Propionibacterium virus P100A, Propionibacterium virus P100D, Propionibacterium virus P101A, Propionibacterium virus P104A, Propionibacterium virus PA6, Propionibacterium virus Pacnes201215, Propionibacterium virus PAD20, Propionibacterium virus PAS50, Propionibacterium virus PHL009M11, Propionibacterium virus PHL025M00, Propionibacterium virus PHL037M02, Propionibacterium virus PHL041M10, Propionibacterium virus PHL060L00, Propionibacterium virus PHL067M01, Propionibacterium virus PHL070N00, Propionibacterium virus PHL071N05, Propionibacterium virus PHL082M03, Propionibacterium virus PHL092M00, Propionibacterium virus PHL095N00, Propionibacterium virus PHL111M01, Propionibacterium virus PHL112N00, Propionibacterium virus PHL113M01, Propionibacterium virus PHL114L00, Propionibacterium virus PHL116M00, Propionibacterium virus PHL117M00, Propionibacterium virus PHL117M01, Propionibacterium virus PHL132N00, Propionibacterium virus PHL141N00, Propionibacterium virus PHL151M00, Propionibacterium virus PHL151N00, Propionibacterium virus PHL152M00, Propionibacterium virus PHL163M00, Propionibacterium virus PHL171M01, Propionibacterium virus PHL179M00, Propionibacterium virus PHL194M00, Propionibacterium virus PHL199M00, Propionibacterium virus PHL301M00, Propionibacterium virus PHL308M00, Propionibacterium virus Pirate, Propionibacterium virus Procrass1, Propionibacterium virus SKKY, Propionibacterium virus Solid, Propionibacterium virus Stormborn, Propionibacterium virus Wizzo, Pseudomonas virus PaMx28, Pseudomonas virus PaMx74, Mycobacterium virus Papyrus, Mycobacterium virus Send513, Mycobacterium virus Patience, Mycobacterium virus PBI1, Rhodococcus virus Pepy6, Rhodococcus virus Poco6, Staphylococcus virus 11, Staphylococcus virus 29, Staphylococcus virus 37, Staphylococcus virus 53, Staphylococcus virus 55, Staphylococcus virus 69, Staphylococcus virus 71, Staphylococcus virus 80, Staphylococcus virus 85, Staphylococcus virus 88, Staphylococcus virus 92, Staphylococcus virus 96, Staphylococcus virus 187, Staphylococcus virus 52a, Staphylococcus virus 80alpha, Staphylococcus virus CNPH82, Staphylococcus virus EW, Staphylococcus virus IPLA5, Staphylococcus virus IPLA7, Staphylococcus virus IPLA88, Staphylococcus virus PH15, Staphylococcus virus phiETA, Staphylococcus virus phiETA2, Staphylococcus virus phiETA3, Staphylococcus virus phiMR11, Staphylococcus virus phiMR25, Staphylococcus virus phiNM1, Staphylococcus virus phiNM2, Staphylococcus virus phiNM4, Staphylococcus virus SAP26, Staphylococcus virus X2, Enterococcus virus FL1, Enterococcus virus FL2, Enterococcus virus FL3, Streptomyces virus Picard, Microbacterium virus Pikmin, Corynebacterium virus Poushou, Providencia virus PR1, Listeria virus LP302, Listeria virus PSA, Psimunavirus psiM2, Propionibacterium virus PFR1, Microbacterium phage KaiHaiDragon, Microbacterium phage Paschalis, Microbacterium phage Quhwah, Streptomyces virus Darolandstone, Streptomyces virus Raleigh, Escherichia virus N15, Rhodococcus virus RER2, Rhizobium virus P106B, Strepomyces virus Drgrey, Strepomyces virus Rima, Microbacterium virus Hendrix, Gordonia virus Fryberger, Gordonia virus Ronaldo, Aeromonas virus pIS4A, Streptomyces virus Rowa, Gordonia virus Ruthy, Streptomyces virus Jay2Jay, Streptomyces virus Mildred21, Streptomyces virus NootNoot, Streptomyces virus Paradiddles, Streptomyces virus Peebs, Streptomyces virus Samisti12, Pseudomonas virus SM1, Corynebacterium virus SamW, Xylella virus Salvo, Xylella virus Sano, Caulobacter virus Sansa, Enterococcus virus BC611, Enterococcus virus IMEEF1, Enterococcus virus SAP6, Enterococcus virus VD13, Streptococcus virus SPQS1, Salmonella virus Sasha, Corynebacterium virus BFK20, Geobacillus virus Tp84, Streptomyces virus Scap1, Gordonia virus Schnabeltier, Microbacterium virus Schubert, Pseudomonas virus 73, Pseudomonas virus Ab26, Pseudomonas virus Kakheti25, Escherichia virus Cajan, Escherichia virus Seurat, Caulobacter virus Seuss, Staphylococcus virus SEP9, Staphylococcus virus Sextaec, Paenibacillus virus Diva, Paenibacillus virus Hb10c2, Paenibacillus virus Rani, Paenibacillus virus Shelly, Paenibacillus virus Sitara, Paenibacillus virus Willow, Lactococcus virus 712, Lactococcus virus ASCC191, Lactococcus virus ASCC273, Lactococcus virus ASCC281, Lactococcus virus ASCC465, Lactococcus virus ASCC532, Lactococcus virus Bibb29, Lactococcus virus bIL170, Lactococcus virus CB13, Lactococcus virus CB14, Lactococcus virus CB19, Lactococcus virus CB20, Lactococcus virus jj50, Lactococcus virus P2, Lactococcus virus P008, Lactococcus virus sk1, Lactococcus virus S14, Bacillus virus Slash, Bacillus virus Stahl, Bacillus virus Staley, Bacillus virus Stills, Gordonia virus Bachita, Gordonia virus ClubL, Gordonia virus Smoothie, Arthobacter virus Sonali, Gordonia virus Soups, Gordonia virus Strosahl, Gordonia virus Wait, Gordonia virus Sour, Bacillus virus SPbeta, Microbacterium virus Hyperion, Microbacterium virus Squash, Burkholderia virus phi6442, Burkholderia virus phi1026b, Burkholderia virus phiE125, Achromobacter virus 83-24, Achromobacter virus JWX, Arthrobacter virus Tank, Gordonia virus Suzy, Gordonia virus Terapin, Streptomyces virus TG1, Mycobacterium virus Anaya, Mycobacterium virus Angelica, Mycobacterium virus CrimD, Mycobacterium virus Fionnbharth, Mycobacterium virus JAWS, Mycobacterium virus Larva, Mycobacterium virus MacnCheese, Mycobacterium virus Pixie, Mycobacterium virus TM4, Tsukamurella virus TIN2, Tsukamurella virus TIN3, Tsukamurella virus TIN4, Rhodobacter virus RcSpartan, Rhodobacter virus RcTitan, Mycobacterium virus Tortellini, Staphylococcus virus 47, Staphylococcus virus 3a, Staphylococcus virus 42e, Staphylococcus virus IPLA35, Staphylococcus virus phi12, Staphylococcus virus phiSLT, Mycobacterium virus 32HC, Rhodococcus virus Trina, Gordonia virus Trine, Paenibacillus virus Tripp, Flavobacterium virus 1H, Flavobacterium virus 23T, Flavobacterium virus 2A, Flavobacterium virus 6H, Streptomyces virus Lilbooboo, Streptomyces virus Vash, Paenibacillus virus Vegas, Gordonia virus Vendetta, Paracoccus virus Shpa, Pantoea virus Vid5, Acinetobacter virus B1251, Acinetobacter virus R3177, Gordonia virus Brandonk123, Gordonia virus Lennon, Gordonia virus Vivi2, Bordetella virus CN1, Bordetella virus CN2, Bordetella virus FP1, Bordetella virus MW2, Bacillus virus Wbeta, Rhodococcus virus Weasel, Mycobacterium virus Wildcat, Gordonia virus Billnye, Gordonia virus Twister6, Gordonia virus Wizard, Gordonia virus Hotorobo, Gordonia virus Woes, Streptomyces virus TP1604, Streptomyces virus YDN12, Roseobacter virus RDJL1, Roseobacter virus RDJL2, Xanthomonas virus OP1, Xanthomonas virus Xop411, Xanthomonas virus Xp10, Arthobacter virus Yang, Alphaproteobacteria virus phiJ1001, Pseudomonas virus LKO4, Pseudomonas virus M6, Pseudomonas virus MP1412, Pseudomonas virus PAE1, Pseudomonas virus Yua, Gordonia virus Yvonnetastic, Microbacterium virus Zeta1847, Rhodococcus virus RGL3, Paenibacillus virus Lily, Vibrio virus CTXphi, Propionibacterium virus B5, Vibrio virus KSF1, Xanthomonas virus Cf1c, Vibrio virus fs1, Vibrio virus VGJ, Ralstonia virus RS551, Ralstonia virus RS603, Ralstonia virus RSM1, Ralstonia virus RSM3, Escherichia virus If1, Escherichia virus M13, Escherichia virus 122, Salmonella virus IKe, Ralstonia virus PE226, Pseudomonas virus Pf1, Stenotrophomonas virus PSH1, Ralstonia virus RSS1, Vibrio virus fs2, Vibrio virus VFJ, Stenotrophomonas virus SMA6, Stenotrophomonas virus SMA5, Stenotrophomonas virus SMA7, Pseudomonas virus Pf3, Thermus virus OH3, Vibrio virus VfO3K6, Vibrio virus VCY, Vibrio virus Vf33, Xanthomonas virus Xf109, Acholeplasma virus L51, Spiroplasma virus SVTS2, Spiroplasma virus C74, Spiroplasma virus R8A2B, Spiroplasma virus SkV1CR23x, Escherichia virus alpha3, Escherichia virus ID21, Escherichia virus ID32, Escherichia virus ID62, Escherichia virus NC28, Escherichia virus NC29, Escherichia virus NC35, Escherichia virus phiK, Escherichia virus St1, Escherichia virus WA45, Escherichia virus G4, Escherichia virus ID52, Escherichia virus Talmos, Escherichia virus phiX174, Bdellovibrio virus MAC1, Bdellovibrio virus MI-12K, Chlamydia virus Chp1, Chlamydia virus Chp2, Chlamydia virus CPAR39, Chlamydia virus CPG1, Spiroplasma virus SpV4, Bombyx mori bidensovirus, Acerodon celebensis polyomavirus 1, Artibeus planirostris polyomavirus 2, Artibeus planirostris polyomavirus 3, Ateles paniscus polyomavirus 1, Cardioderma cor polyomavirus 1, Carollia perspicillata polyomavirus 1, Chlorocebus pygerythrus polyomavirus 1, Chlorocebus pygerythrus polyomavirus 3, Dobsonia moluccensis polyomavirus 1, Eidolon helvum polyomavirus 1, Gorilla gorilla polyomavirus 1, Human polyomavirus 5, Human polyomavirus 8, Human polyomavirus 9, Human polyomavirus 13, Human polyomavirus 14, Macaca fascicularis polyomavirus 1, Mesocricetus auratus polyomavirus 1, Miniopterus schreibersii polyomavirus 1, Miniopterus schreibersii polyomavirus 2, Molossus molossus polyomavirus 1, Mus musculus polyomavirus 1, Otomops martiensseni polyomavirus 1, Otomops martiensseni polyomavirus 2, Pan troglodytes polyomavirus 1, Pan troglodytes polyomavirus 2, Pan troglodytes polyomavirus 3, Pan troglodytes polyomavirus 4, Pan troglodytes polyomavirus 5, Pan troglodytes polyomavirus 6, Pan troglodytes polyomavirus 7, Papio cynocephalus polyomavirus 1, Piliocolobus badius polyomavirus 1, Piliocolobus rufomitratus polyomavirus 1, Pongo abelii polyomavirus 1, Pongo pygmaeus polyomavirus 1, Procyon lotor polyomavirus 1, Pteropus vampyrus polyomavirus 1, Rattus norvegicus polyomavirus 1, Sorex araneus polyomavirus 1, Sorex coronatus polyomavirus 1, Sorex minutus polyomavirus 1, Sturnira lilium polyomavirus 1, Tupaia belangeri polyomavirus 1, Acerodon celebensis polyomavirus 2, Artibeus planirostris polyomavirus 1, Canis familiaris polyomavirus 1, Cebus albifrons polyomavirus 1, Cercopithecus erythrotis polyomavirus 1, Chlorocebus pygerythrus polyomavirus 2, Desmodus rotundus polyomavirus 1, Dobsonia moluccensis polyomavirus 2, Dobsonia moluccensis polyomavirus 3, Enhydra lutris polyomavirus 1, Equus caballus polyomavirus 1, Human polyomavirus 1, Human polyomavirus 2, Human polyomavirus 3, Human polyomavirus 4, Leptonychotes weddellii polyomavirus 1, Loxodonta africana polyomavirus 1, Macaca mulatta polyomavirus 1, Mastomys natalensis polyomavirus 1, Meles meles polyomavirus 1, Microtus arvalis polyomavirus 1, Miniopterus africanus polyomavirus 1, Mus musculus polyomavirus 2, Mus musculus polyomavirus 3, Myodes glareolus polyomavirus 1, Myotis lucifugus polyomavirus 1, Pan troglodytes polyomavirus 8, Papio cynocephalus polyomavirus 2, Pteronotus davyi polyomavirus 1, Pteronotus parnellii polyomavirus 1, Rattus norvegicus polyomavirus 2, Rousettus aegyptiacus polyomavirus 1, Saimiri boliviensis polyomavirus 1, Saimiri sciureus polyomavirus 1, Vicugna pacos polyomavirus 1, Zalophus californianus polyomavirus 1, Human polyomavirus 6, Human polyomavirus 7, Human polyomavirus 10, Human polyomavirus 11, Anser anser polyomavirus 1, Ayes polyomavirus 1, Corvus monedula polyomavirus 1, Cracticus torquatus polyomavirus 1, Erythrura gouldiae polyomavirus 1, Lonchura maja polyomavirus 1, Pygoscelis adeliae polyomavirus 1, Pyrrhula pyrrhula polyomavirus 1, Serinus canaria polyomavirus 1, Ailuropoda melanoleuca polyomavirus 1, Bos taurus polyomavirus 1, Centropristis striata polyomavirus 1, Delphinus delphis polyomavirus 1, Procyon lotor polyomavirus 2, Rhynchobatus djiddensis polyomavirus 1, Sparus aurata polyomavirus 1, Trematomus bernacchii polyomavirus 1, Trematomus pennellii polyomavirus 1, Alphapapillomavirus 1, Alphapapillomavirus 2, Alphapapillomavirus 3, Alphapapillomavirus 4, Alphapapillomavirus 5, Alphapapillomavirus 6, Alphapapillomavirus 7, Alphapapillomavirus 8, Alphapapillomavirus 9, Alphapapillomavirus 10, Alphapapillomavirus 11, Alphapapillomavirus 12, Alphapapillomavirus 13, Alphapapillomavirus 14, Betapapillomavirus 1, Betapapillomavirus 2, Betapapillomavirus 3, Betapapillomavirus 4, Betapapillomavirus 5, Betapapillomavirus 6, Chipapillomavirus 1, Chipapillomavirus 2, Chipapillomavirus 3, Deltapapillomavirus 1, Deltapapillomavirus 2, Deltapapillomavirus 3, Deltapapillomavirus 4, Deltapapillomavirus 5, Deltapapillomavirus 6, Deltapapillomavirus 7, Dyochipapillomavirus 1, Dyodeltapapillomavirus 1, Dyoepsilonpapillomavirus 1, Dyoetapapillomavirus 1, Dyoiotapapillomavirus 1, Dyoiotapapillomavirus 2, Dyokappapapillomavirus 1, Dyokappapapillomavirus 2, Dyokappapapillomavirus 3, Dyokappapapillomavirus 4, Dyokappapapillomavirus 5, Dyolambdapapillomavirus 1, Dyomupapillomavirus 1, Dyonupapillomavirus 1, Dyoomegapapillomavirus 1, Dyoomikronpapillomavirus 1, Dyophipapillomavirus 1, Dyopipapillomavirus 1, Dyopsipapillomavirus 1, Dyorhopapillomavirus 1, Dyosigmapapillomavirus 1, Dyotaupapillomavirus 1, Dyothetapapillomavirus 1, Dyoupsilonpapillomavirus 1, Dyoxipapillomavirus 1, Dyoxipapillomavirus 2, Dyozetapapillomavirus 1, Epsilonpapillomavirus 1, Epsilonpapillomavirus 2, Etapapillomavirus 1, Gammapapillomavirus 1, Gammapapillomavirus 2, Gammapapillomavirus 3, Gammapapillomavirus 4, Gammapapillomavirus 5, Gammapapillomavirus 6, Gammapapillomavirus 7, Gammapapillomavirus 8, Gammapapillomavirus 9, Gammapapillomavirus 10, Gammapapillomavirus 11, Gammapapillomavirus 12, Gammapapillomavirus 13, Gammapapillomavirus 14, Gammapapillomavirus 15, Gammapapillomavirus 16, Gammapapillomavirus 17, Gammapapillomavirus 18, Gammapapillomavirus 19, Gammapapillomavirus 20, Gammapapillomavirus 21, Gammapapillomavirus 22, Gammapapillomavirus 23, Gammapapillomavirus 24, Gammapapillomavirus 25, Gammapapillomavirus 26, Gammapapillomavirus 27, Iotapapillomavirus 1, Iotapapillomavirus 2, Kappapapillomavirus 1, Kappapapillomavirus 2, Lambdapapillomavirus 1, Lambdapapillomavirus 2, Lambdapapillomavirus 3, Lambdapapillomavirus 4, Lambdapapillomavirus 5, Mupapillomavirus 1, Mupapillomavirus 2, Mupapillomavirus 3, Nupapillomavirus 1, Omegapapillomavirus 1, Omikronpapillomavirus 1, Phipapillomavirus 1, Pipapillomavirus 1, Pipapillomavirus 2, Psipapillomavirus 1, Psipapillomavirus 2, Psipapillomavirus 3, Rhopapillomavirus 1, Rhopapillomavirus 2, Sigmapapillomavirus 1, Taupapillomavirus 1, Taupapillomavirus 2, Taupapillomavirus 3, Taupapillomavirus 4, Thetapapillomavirus 1, Treisdeltapapillomavirus 1, Treisepsilonpapillomavirus 1, Treisetapapillomavirus 1, Treisiotapapillomavirus 1, Treiskappapapillomavirus 1, Treisthetapapillomavirus 1, Treiszetapapillomavirus 1, Upsilonpapillomavirus 1, Upsilonpapillomavirus 2, Upsilonpapillomavirus 3, Xipapillomavirus 1, Xipapillomavirus 2, Xipapillomavirus 3, Xipapillomavirus 4, Xipapillomavirus 5, Zetapapillomavirus 1, Alefpapillomavirus 1, Asteroid aquambidensovirus 1, Decapod aquambidensovirus 1, Blattodean blattambidensovirus 1, Hemipteran hemiambidensovirus 1, Hemipteran hemiambidensovirus 2, Lepidopteran iteradensovirus 1, Lepidopteran iteradensovirus 2, Lepidopteran iteradensovirus 3, Lepidopteran iteradensovirus 4, Lepidopteran iteradensovirus 5, Orthopteran miniambidensovirus 1, Blattodean pefuambidensovirus 1, Dipteran protoambidensovirus 1, Lepidopteran protoambidensovirus 1, Hemipteran scindoambidensovirus 1, Hymenopteran scindoambidensovirus 1, Orthopteran scindoambidensovirus 1, Dipteran brevihamaparvovirus 1, Dipteran brevihamaparvovirus 2, Carnivore chaphamaparvovirus 1, Chiropteran chaphamaparvovirus 1, Galliform chaphamaparvovirus 1, Galliform chaphamaparvovirus 2, Galliform chaphamaparvovirus 3, Rodent chaphamaparvovirus 1, Rodent chaphamaparvovirus 2, Ungulate chaphamaparvovirus 1, Decapod hepanhamaparvovirus 1, Syngnathid ichthamaparvovirus 1, Decapod penstylhamaparvovirus 1, Carnivore amdoparvovirus 1, Carnivore amdoparvovirus 2, Carnivore amdoparvovirus 3, Carnivore amdoparvovirus 4, Carnivore amdoparvovirus 5, Chiropteran artiparvovirus 1, Galliform aveparvovirus 1, Gruiform aveparvovirus 1, Carnivore bocaparvovirus 1, Carnivore bocaparvovirus 2, Carnivore bocaparvovirus 3, Carnivore bocaparvovirus 4, Carnivore bocaparvovirus 5, Carnivore bocaparvovirus 6, Chiropteran bocaparvovirus 1, Chiropteran bocaparvovirus 2, Chiropteran bocaparvovirus 3, Chiropteran bocaparvovirus 4, Lagomorph bocaparvovirus 1, Pinniped bocaparvovirus 1, Pinniped bocaparvovirus 2, Primate bocaparvovirus 1, Primate bocaparvovirus 2, Rodent bocaparvovirus 1, Rodent bocaparvovirus 2, Ungulate bocaparvovirus 1, Ungulate bocaparvovirus 2, Ungulate bocaparvovirus 3, Ungulate bocaparvovirus 4, Ungulate bocaparvovirus 5, Ungulate bocaparvovirus 6, Ungulate bocaparvovirus 7, Ungulate bocaparvovirus 8, Pinniped copiparvovirus 1, Ungulate copiparvovirus 1, Ungulate copiparvovirus 2, Ungulate copiparvovirus 3, Ungulate copiparvovirus 4, Ungulate copiparvovirus 5, Ungulate copiparvovirus 6, Adeno-associated dependoparvovirus A, Adeno-associated dependoparvovirus B, Anseriform dependoparvovirus 1, Avian dependoparvovirus 1, Chiropteran dependoparvovirus 1, Pinniped dependoparvovirus 1, Rodent dependoparvovirus 1, Rodent dependoparvovirus 2, Squamate dependoparvovirus 1, Squamate dependoparvovirus 2, Pinniped erythroparvovirus 1, Primate erythroparvovirus 1, Primate erythroparvovirus 2, Primate erythroparvovirus 3, Primate erythroparvovirus 4, Rodent erythroparvovirus 1, Ungulate erythroparvovirus 1, Primate loriparvovirus 1, Carnivore protoparvovirus, Carnivore protoparvovirus 1, Chiropteran protoparvovirus 1, Eulipotyphla protoparvovirus 1, Primate protoparvovirus 1, Primate protoparvovirus 2, Primate protoparvovirus 3, Primate protoparvovirus 4, Rodent protoparvovirus 1, Rodent protoparvovirus 2, Rodent protoparvovirus 3, Ungulate protoparvovirus 1, Ungulate protoparvovirus 2, Chiropteran tetraparvovirus 1, Primate tetraparvovirus 1, Ungulate tetraparvovirus 1, Ungulate tetraparvovirus 2, Ungulate tetraparvovirus 3, Ungulate tetraparvovirus 4, Chaetoceros diatodnavirus 1, Avon-Heathcote Estuary associated kieseladnavirus, Chaetoceros protobacilladnavirus 1, Chaetoceros protobacilladnavirus 2, Chaetoceros protobacilladnavirus 3, Chaetoceros protobacilladnavirus 4, Marine protobacilladnavirus 1, Snail associated protobacilladnavirus 1, Snail associated protobacilladnavirus 2, Barbel circovirus, Bat associated circovirus 1, Bat associated circovirus 2, Bat associated circovirus 3, Bat associated circovirus 4, Bat associated circovirus 5, Bat associated circovirus 6, Bat associated circovirus 7, Bat associated circovirus 8, Bat associated circovirus 9, Bat associated circovirus 10, Bat associated circovirus 11, Bat associated circovirus 12, Beak and feather disease virus, Canary circovirus, Canine circovirus, Chimpanzee associated circovirus 1, Civet circovirus, Duck circovirus, European catfish circovirus, Finch circovirus, Goose circovirus, Gull circovirus, Human associated circovirus 1, Mink circovirus, Mosquito associated circovirus 1, Pigeon circovirus, Porcine circovirus 1, Porcine circovirus 2, Porcine circovirus 3, Raven circovirus, Rodent associated circovirus 1, Rodent associated circovirus 2, Rodent associated circovirus 3, Rodent associated circovirus 4, Rodent associated circovirus 5, Rodent associated circovirus 6, Rodent associated circovirus 7, Starling circovirus, Swan circovirus, Tick associated circovirus 1, Tick associated circovirus 2, Zebra finch circovirus, Ant associated cyclovirus 1, Bat associated cyclovirus 1, Bat associated cyclovirus 2, Bat associated cyclovirus 3, Bat associated cyclovirus 4, Bat associated cyclovirus 5, Bat associated cyclovirus 6, Bat associated cyclovirus 7, Bat associated cyclovirus 8, Bat associated cyclovirus 9, Bat associated cyclovirus 10, Bat associated cyclovirus 11, Bat associated cyclovirus 12, Bat associated cyclovirus 13, Bat associated cyclovirus 14, Bat associated cyclovirus 15, Bat associated cyclovirus 16, Bovine associated cyclovirus 1, Chicken associated cyclovirus 1, Chicken associated cyclovirus 2, Chimpanzee associated cyclovirus 1, Cockroach associated cyclovirus 1, Dragonfly associated cyclovirus 1, Dragonfly associated cyclovirus 2, Dragonfly associated cyclovirus 3, Dragonfly associated cyclovirus 4, Dragonfly associated cyclovirus 5, Dragonfly associated cyclovirus 6, Dragonfly associated cyclovirus 7, Dragonfly associated cyclovirus 8, Duck associated cyclovirus 1, Feline associated cyclovirus 1, Goat associated cyclovirus 1, Horse associated cyclovirus 1, Human associated cyclovirus 1, Human associated cyclovirus 2, Human associated cyclovirus 3, Human associated cyclovirus 4, Human associated cyclovirus 5, Human associated cyclovirus 6, Human associated cyclovirus 7, Human associated cyclovirus 8, Human associated cyclovirus 9, Human associated cyclovirus 10, Human associated cyclovirus 11, Human associated cyclovirus 12, Mouse associated cyclovirus 1, Rodent associated cyclovirus 1, Rodent associated cyclovirus 2, Spider associated cyclovirus 1, Squirrel associated cyclovirus 1, Bovine associated bovismacovirus 1, Bovine associated bovismacovirus 2, Dragonfly associated bovismacovirus 1, Bovine associated cosmacovirus 1, Dragonfly associated dragsmacovirus 1, Bovine associated drosmacovirus 1, Camel associated drosmacovirus 1, Camel associated drosmacovirus2, Bovine associated huchismacovirus 1, Bovine associated huchismacovirus 2, Chicken associated huchismacovirus 1, Chicken associated huchismacovirus 2, Human associated huchismacovirus 1, Human associated huchismacovirus 2, Human associated huchismacovirus 3, Bovine associated porprismacovirus 1, Camel associated porprismacovirus 1, Camel associated porprismacovirus 2, Camel associated porprismacovirus 3, Camel associated porprismacovirus 4, Chimpanzee associated porprismacovirus 1, Chimpanzee associated porprismacovirus 2, Gorilla associated porprismacovirus 1, Howler monkey associated porprismacovirus 1, Human associated porprismacovirus 1, Human associated porprismacovirus 2, Lemur associated porprismacovirus 1, Porcine associated porprismacovirus 1, Porcine associated porprismacovirus 2, Porcine associated porprismacovirus 3, Porcine associated porprismacovirus 4, Porcine associated porprismacovirus 5, Porcine associated porprismacovirus 6, Porcine associated porprismacovirus 7, Porcine associated porprismacovirus 8, Porcine associated porprismacovirus 9, Porcine associated porprismacovirus 10, Rat associated porprismacovirus 1, Sheep associated porprismacovirus 1, Sheep associated porprismacovirus 2, Sheep associated porprismacovirus 3, Turkey associated porprismacovirus 1, Abaca bunchy top virus, Banana bunchy top virus, Cardamom bushy dwarf virus, Black medic leaf roll virus, Faba bean necrotic stunt virus, Faba bean necrotic yellows virus, Faba bean yellow leaf virus, Milk vetch dwarf virus, Pea necrotic yellow dwarf virus, Pea yellow stunt virus, Subterranean clover stunt virus, Coconut foliar decay virus, Brisavirus, Vientovirus, Beet curly top Iran virus, Exomis microphylla latent virus, Spinach curly top Arizona virus, Abutilon golden mosaic virus, Abutilon mosaic Bolivia virus, Abutilon mosaic Brazil virus, Abutilon mosaic virus, African cassava mosaic Burkina Faso virus, African cassava mosaic virus, Ageratum enation virus, Ageratum leaf curl Sichuan virus, Ageratum leaf curl virus, Ageratum yellow vein Hualian virus, Ageratum yellow vein Sri Lanka virus, Ageratum yellow vein virus, Allamanda leaf curl virus, Allamanda leaf mottle distortion virus, Alternanthera yellow vein virus, Andrographis yellow vein leaf curl virus, Asystasia mosaic Madagascar virus, Bean calico mosaic virus, Bean chlorosis virus, Bean dwarf mosaic virus, Bean golden mosaic virus, Bean golden yellow mosaic virus, Bean leaf crumple virus, Bean white chlorosis mosaic virus, Bean yellow mosaic Mexico virus, Bhendi yellow vein Bhubhaneswar virus, Bhendi yellow vein Haryana virus, Bhendi yellow vein mosaic Delhi virus, Bhendi yellow vein mosaic virus, Bitter gourd yellow mosaic virus, Blainvillea yellow spot virus, Blechum interveinal chlorosis virus, Blechum yellow vein virus, Boerhavia yellow spot virus, Cabbage leaf curl Jamaica virus, Cabbage leaf curl virus, Capraria yellow spot virus, Cassava mosaic Madagascar virus, Catharanthus yellow mosaic virus, Centrosema yellow spot virus, Chayote yellow mosaic virus, Chenopodium leaf curl virus, Chilli leaf curl Ahmedabad virus, Chilli leaf curl Bhavanisagar virus, Chilli leaf curl Gonda virus, Chilli leaf curl India virus, Chilli leaf curl Kanpur virus, Chilli leaf curl Sri Lanka virus, Chilli leaf curl Vellanad virus, Chilli leaf curl virus, Chino del tomate Amazonas virus, Chino del tomate virus, Cleome golden mosaic virus, Cleome leaf crumple virus, Clerodendron golden mosaic virus, Clerodendron yellow mosaic virus, Clerodendrum golden mosaic China virus, Clerodendrum golden mosaic Jiangsu virus, Cnidoscolus mosaic leaf deformation virus, Coccinia mosaic Tamil Nadu virus, Common bean mottle virus, Common bean severe mosaic virus, Corchorus golden mosaic virus, Corchorus yellow spot virus, Corchorus yellow vein mosaic virus, Corchorus yellow vein virus, Cotton chlorotic spot virus, Cotton leaf crumple virus, Cotton leaf curl Alabad virus, Cotton leaf curl Bangalore virus, Cotton leaf curl Barasat virus, Cotton leaf curl Gezira virus, Cotton leaf curl Kokhran virus, Cotton leaf curl Multan virus, Cotton yellow mosaic virus, Cowpea bright yellow mosaic virus, Cowpea golden mosaic virus, Crassocephalum yellow vein virus, Croton golden mosaic virus, Croton yellow vein mosaic virus, Cucurbit leaf crumple virus, Dalechampia chlorotic mosaic virus, Datura leaf curl virus, Datura leaf distortion virus, Deinbollia mosaic virus, Desmodium leaf distortion virus, Desmodium mottle virus, Dicliptera yellow mottle Cuba virus, Dicliptera yellow mottle virus, Dolichos yellow mosaic virus, Duranta leaf curl virus, East African cassava mosaic Cameroon virus, East African cassava mosaic Kenya virus, East African cassava mosaic Malawi virus, East African cassava mosaic virus, East African cassava mosaic Zanzibar virus, Eclipta yellow vein virus, Emilia yellow vein Fujian virus, Emilia yellow vein Thailand virus, Emilia yellow vein virus, Erectites yellow mosaic virus, Eupatorium yellow vein mosaic virus, Eupatorium yellow vein virus, Euphorbia leaf curl Guangxi virus, Euphorbia leaf curl virus, Euphorbia mosaic Peru virus, Euphorbia mosaic virus, Euphorbia yellow leaf curl virus, Euphorbia yellow mosaic virus, French bean leaf curl virus, Hedyotis uncinella yellow mosaic virus, Hemidesmus yellow mosaic virus, Hibiscus golden mosaic virus, Hollyhock leaf curl virus, Hollyhock yellow vein mosaic virus, Hollyhock yellow vein virus, Honeysuckle yellow vein virus, Horsegram yellow mosaic virus, Indian cassava mosaic virus, Jacquemontia mosaic Yucatan virus, Jacquemontia yellow mosaic virus, Jacquemontia yellow vein virus, Jatropha leaf curl Gujarat virus, Jatropha leaf curl virus, Jatropha leaf yellow mosaic virus, Jatropha mosaic India virus, Jatropha mosaic Nigeria virus, Jatropha mosaic virus, Jatropha yellow mosaic virus, Kudzu mosaic virus, Leonurus mosaic virus, Lindernia anagallis yellow vein virus, Lisianthus enation leaf curl virus, Ludwigia yellow vein Vietnam virus, Ludwigia yellow vein virus, Luffa yellow mosaic virus, Lycianthes yellow mosaic virus, Macroptilium bright mosaic virus, Macroptilium common mosaic virus, Macroptilium golden mosaic virus, Macroptilium mosaic Puerto Rico virus, Macroptilium yellow mosaic Florida virus, Macroptilium yellow mosaic virus, Macroptilium yellow spot virus, Macroptilium yellow vein virus, Malvastrum bright yellow mosaic virus, Malvastrum leaf curl Philippines virus, Malvastrum leaf curl virus, Malvastrum yellow mosaic Helshire virus, Malvastrum yellow mosaic Jamaica virus, Malvastrum yellow mosaic virus, Malvastrum yellow vein Cambodia virus, Malvastrum yellow vein Honghe virus, Malvastrum yellow vein Lahore virus, Malvastrum yellow vein virus, Malvastrum yellow vein Yunnan virus, Melochia mosaic virus, Melochia yellow mosaic virus, Melon chlorotic leaf curl virus, Melon chlorotic mosaic virus, Melon yellow mosaic virus, Merremia mosaic Puerto Rico virus, Merremia mosaic virus, Mesta yellow vein mosaic Bahraich virus, Mimosa yellow leaf curl virus, Mirabilis leaf curl virus, Mungbean yellow mosaic India virus, Mungbean yellow mosaic virus, Okra enation leaf curl virus, Okra leaf curl Oman virus, Okra mottle virus, Okra yellow crinkle virus, Okra yellow mosaic Mexico virus, Oxalis yellow vein virus, Papaya leaf crumple virus, Papaya leaf curl China virus, Papaya leaf curl Guandong virus, Papaya leaf curl virus, Passionfruit leaf curl virus, Passionfruit leaf distortion virus, Passionfruit severe leaf distortion virus, Pavonia mosaic virus, Pavonia yellow mosaic virus, Pea leaf distortion virus, Pedilanthus leaf curl virus, Pepper golden mosaic virus, Pepper huasteco yellow vein virus, Pepper leaf curl Bangladesh virus, Pepper leaf curl Lahore virus, Pepper leaf curl virus, Pepper leaf curl Yunnan virus, Pepper leafroll virus, Pepper yellow leaf curl Aceh virus, Pepper yellow leaf curl Indonesia virus, Pepper yellow leaf curl Indonesia virus 2, Pepper yellow leaf curl Thailand virus, Pepper yellow leaf curl virus, Pepper yellow vein Mali virus, Potato yellow mosaic Panama virus, Potato yellow mosaic virus, Pouzolzia golden mosaic virus, Pouzolzia mosaic Guangdong virus, Pouzolzia yellow mosaic virus, Premna leaf curl virus, Pumpkin yellow mosaic virus, Radish leaf curl virus, Ramie mosaic Yunnan virus, Rhynchosia golden mosaic Havana virus, Rhynchosia golden mosaic Sinaloa virus, Rhynchosia golden mosaic virus, Rhynchosia mild mosaic virus, Rhynchosia rugose golden mosaic virus, Rhynchosia yellow mosaic India virus, Rhynchosia yellow mosaic virus, Rose leaf curl virus, Sauropus leaf curl virus, Senecio yellow mosaic virus, Senna leaf curl virus, Sida angular mosaic virus, Sida bright yellow mosaic virus, Sida chlorotic mottle virus, Sida chlorotic vein virus, Sida ciliaris golden mosaic virus, Sida common mosaic virus, Sida golden mosaic Braco virus, Sida golden mosaic Brazil virus, Sida golden mosaic Buckup virus, Sida golden mosaic Costa Rica virus, Sida golden mosaic Florida virus, Sida golden mosaic Lara virus, Sida golden mosaic virus, Sida golden mottle virus, Sida golden yellow spot virus, Sida golden yellow vein virus, Sida leaf curl virus, Sida micrantha mosaic virus, Sida mosaic Alagoas virus, Sida mosaic Bolivia virus 1, Sida mosaic Bolivia virus 2, Sida mosaic Sinaloa virus, Sida mottle Alagoas virus, Sida mottle virus, Sida yellow blotch virus, Sida yellow leaf curl virus, Sida yellow mosaic Alagoas virus, Sida yellow mosaic China virus, Sida yellow mosaic virus, Sida yellow mosaic Yucatan virus, Sida yellow mottle virus, Sida yellow net virus, Sida yellow vein Vietnam virus, Sida yellow vein virus, Sidastrum golden leaf spot virus, Siegesbeckia yellow vein Guangxi virus, Siegesbeckia yellow vein virus, Solanum mosaic Bolivia virus, South African cassava mosaic virus, Soybean blistering mosaic virus, Soybean chlorotic blotch virus, Soybean mild mottle virus, Spilanthes yellow vein virus, Spinach yellow vein virus, Squash leaf curl China virus, Squash leaf curl Philippines virus, Squash leaf curl virus, Squash leaf curl Yunnan virus, Squash mild leaf curl virus, Sri Lankan cassava mosaic virus, Stachytarpheta leaf curl virus, Sunn hemp leaf distortion virus, Sweet potato golden vein Korea virus, Sweet potato leaf curl Canary virus, Sweet potato leaf curl China virus, Sweet potato leaf curl Georgia virus, Sweet potato leaf curl Guangxi virus, Sweet potato leaf curl Henan virus, Sweet potato leaf curl Hubei virus, Sweet potato leaf curl Sao Paulo virus, Sweet potato leaf curl Shandong virus, Sweet potato leaf curl Sichuan virus 1, Sweet potato leaf curl Sichuan virus 2, Sweet potato leaf curl South Carolina virus, Sweet potato leaf curl virus, Sweet potato mosaic virus, Synedrella yellow vein clearing virus, Telfairia golden mosaic virus, Tobacco curly shoot virus, Tobacco leaf curl Comoros virus, Tobacco leaf curl Cuba virus, Tobacco leaf curl Dominican Republic virus, Tobacco leaf curl Pusa virus, Tobacco leaf curl Thailand virus, Tobacco leaf curl Yunnan virus, Tobacco leaf curl Zimbabwe virus, Tobacco leaf rugose virus, Tobacco mottle leaf curl virus, Tobacco yellow crinkle virus, Tomato bright yellow mosaic virus, Tomato bright yellow mottle virus, Tomato chino La Paz virus, Tomato chlorotic leaf curl virus, Tomato chlorotic leaf distortion virus, Tomato chlorotic mottle Guyane virus, Tomato chlorotic mottle virus, Tomato common mosaic virus, Tomato curly stunt virus, Tomato dwarf leaf virus, Tomato enation leaf curl virus, Tomato golden leaf distortion virus, Tomato golden leaf spot virus, Tomato golden mosaic virus, Tomato golden mottle virus, Tomato golden vein virus, Tomato interveinal chlorosis virus, Tomato latent virus, Tomato leaf curl Anjouan virus, Tomato leaf curl Arusha virus, Tomato leaf curl Bangalore virus, Tomato leaf curl Bangladesh virus, Tomato leaf curl Burkina Faso virus, Tomato leaf curl Cebu virus, Tomato leaf curl China virus, Tomato leaf curl Comoros virus, Tomato leaf curl Diana virus, Tomato leaf curl Ghana virus, Tomato leaf curl Guangdong virus, Tomato leaf curl Guangxi virus, Tomato leaf curl Gujarat virus, Tomato leaf curl Hainan virus, Tomato leaf curl Hanoi virus, Tomato leaf curl Hsinchu virus, Tomato leaf curl Iran virus, Tomato leaf curl Japan virus, Tomato leaf curl Java virus, Tomato leaf curl Joydebpur virus, Tomato leaf curl Karnataka virus, Tomato leaf curl Karnataka virus 2, Tomato leaf curl Karnataka virus 3, Tomato leaf curl Kerala virus, Tomato leaf curl Laos virus, Tomato leaf curl Liwa virus, Tomato leaf curl Madagascar virus, Tomato leaf curl Mahe virus, Tomato leaf curl Malaysia virus, Tomato leaf curl Mali virus, Tomato leaf curl Mindanao virus, Tomato leaf curl Moheli virus, Tomato leaf curl Namakely virus, Tomato leaf curl New Delhi virus, Tomato leaf curl New Delhi virus 2, Tomato leaf curl New Delhi virus 4, Tomato leaf curl New Delhi virus 5, Tomato leaf curl Nigeria virus, Tomato leaf curl Palampur virus, Tomato leaf curl Patna virus, Tomato leaf curl Philippines virus, Tomato leaf curl Pune virus, Tomato leaf curl purple vein virus, Tomato leaf curl Rajasthan virus, Tomato leaf curl Seychelles virus, Tomato leaf curl Sinaloa virus, Tomato leaf curl Sri Lanka virus, Tomato leaf curl Sudan virus, Tomato leaf curl Sulawesi virus, Tomato leaf curl Taiwan virus, Tomato leaf curl Tanzania virus, Tomato leaf curl Toliara virus, Tomato leaf curl Uganda virus, Tomato leaf curl Vietnam virus, Tomato leaf curl virus, Tomato leaf deformation virus, Tomato leaf distortion virus, Tomato mild mosaic virus, Tomato mild yellow leaf curl Aragua virus, Tomato mosaic Havana virus, Tomato mottle leaf curl virus, Tomato mottle Taino virus, Tomato mottle virus, Tomato mottle wrinkle virus, Tomato rugose mosaic virus, Tomato rugose yellow leaf curl virus, Tomato severe leaf curl Kalakada virus, Tomato severe leaf curl virus, Tomato severe rugose virus, Tomato twisted leaf virus, Tomato wrinkled mosaic virus, Tomato yellow leaf curl Axarquia virus, Tomato yellow leaf curl China virus, Tomato yellow leaf curl Guangdong virus, Tomato yellow leaf curl Indonesia virus, Tomato yellow leaf curl Kanchanaburi virus, Tomato yellow leaf curl Malaga virus, Tomato yellow leaf curl Mali virus, Tomato yellow leaf curl Sardinia virus, Tomato yellow leaf curl Shuangbai virus, Tomato yellow leaf curl Thailand virus, Tomato yellow leaf curl Vietnam virus, Tomato yellow leaf curl virus, Tomato yellow leaf curl Yunnan virus, Tomato yellow leaf distortion virus, Tomato yellow margin leaf curl virus, Tomato yellow mottle virus, Tomato yellow spot virus, Tomato yellow vein streak virus, Triumfetta yellow mosaic virus, Velvet bean golden mosaic virus, Velvet bean severe mosaic virus, Vernonia crinkle virus, Vernonia yellow vein Fujian virus, Vernonia yellow vein virus, Vigna yellow mosaic virus, Vinca leaf curl virus, Watermelon chlorotic stunt virus, West African Asystasia virus 1, West African Asystasia virus 2, West African Asystasia virus 3, Whitefly-associated begomovirus 1, Whitefly-associated begomovirus 2, Whitefly-associated begomovirus 3, Whitefly-associated begomovirus 4, Whitefly-associated begomovirus 6, Whitefly-associated begomovirus 7, Wissadula golden mosaic virus, Wissadula yellow mosaic virus, Alfalfa leaf curl virus, Euphorbia caput-medusae latent virus, French bean severe leaf curl virus, Plantago lanceolata latent virus, Beet curly top virus, Horseradish curly top virus, Spinach severe curly top virus, Eragrostis curvula streak virus, Grapevine red blotch virus, Prunus latent virus, Wild Vitis latent virus, Axonopus compressus streak virus, Bromus catharticus striate mosaic virus, Chickpea chlorosis Australia virus, Chickpea chlorosis virus, Chickpea chlorotic dwarf virus, Chickpea redleaf virus, Chickpea yellow dwarf virus, Chickpea yellows virus, Chloris striate mosaic virus, Digitaria ciliaris striate mosaic virus, Digitaria didactyla striate mosaic virus, Digitaria streak virus, Dragonfly-associated mastrevirus, Eragrostis minor streak virus, Eragrostis streak virus, Maize streak dwarfing virus, Maize streak Reunion virus, Maize streak virus, Maize striate mosaic virus, Miscanthus streak virus, Oat dwarf virus, Panicum streak virus, Paspalum dilatatum striate mosaic virus, Paspalum striate mosaic virus, Rice latent virus 1, Rice latent virus 2, Saccharum streak virus, Sporobolus striate mosaic virus 1, Sporobolus striate mosaic virus 2, Sugarcane chlorotic streak virus, Sugarcane streak Egypt virus, Sugarcane streak Reunion virus, Sugarcane streak virus, Sugarcane striate virus, Sugarcane white streak virus, Sweet potato symptomless virus 1, Switchgrass mosaic-associated virus, Tobacco yellow dwarf virus, Urochloa streak virus, Wheat dwarf India virus, Wheat dwarf virus, Tomato pseudo-curly top virus, Sesame curly top virus, Turnip curly top virus, Turnip leaf roll virus, Citrus chlorotic dwarf associated virus, Mulberry mosaic dwarf associated virus, Blackbird associated gemycircularvirus 1, Bovine associated gemycircularvirus 1, Bromus associated gemycircularvirus 1, Cassava associated gemycircularvirus 1, Chickadee associated gemycircularvirus 1, Chicken associated gemycircularvirus 1, Chicken associated gemycircularvirus 2, Dragonfly associated gemycircularvirus 1, Equine associated gemycircularvirus 1, Fur seal associated gemycircularvirus 1, Gerygone associated gemycircularvirus 1, Gerygone associated gemycircularvirus 2, Gerygone associated gemycircularvirus 3, Hypericum associated gemycircularvirus 1, Lama associated gemycircularvirus 1, Mallard associated gemycircularvirus 1, Miniopterus associated gemycircularvirus 1, Mongoose associated gemycircularvirus 1, Mosquito associated gemycircularvirus 1, Odonata associated gemycircularvirus 1, Odonata associated gemycircularvirus 2, Poaceae associated gemycircularvirus 1, Porcine associated gemycircularvirus 1, Porcine associated gemycircularvirus 2, Pteropus associated gemycircularvirus 1, Pteropus associated gemycircularvirus 2, Pteropus associated gemycircularvirus 3, Pteropus associated gemycircularvirus 4, Pteropus associated gemycircularvirus 5, Pteropus associated gemycircularvirus 6, Pteropus associated gemycircularvirus 7, Pteropus associated gemycircularvirus 8, Pteropus associated gemycircularvirus 9, Pteropus associated gemycircularvirus 10, Rat associated gemycircularvirus 1, Sclerotinia gemycircularvirus 1, Sewage derived gemycircularvirus 1, Sewage derived gemycircularvirus 2, Sewage derived gemycircularvirus 3, Sewage derived gemycircularvirus 4, Sewage derived gemycircularvirus 5, Sheep associated gemycircularvirus 1, Soybean associated gemycircularvirus 1, Dragonfly associated gemyduguivirus 1, Canine associated gemygorvirus 1, Mallard associated gemygorvirus 1, Pteropus associated gemygorvirus 1, Sewage derived gemygorvirus 1, Starling associated gemygorvirus 1, Badger associated gemykibivirus 1, Black robin associated gemykibivirus 1, Blackbird associated gemykibivirus 1, Bovine associated gemykibivirus 1, Dragonfly associated gemykibivirus 1, Human associated gemykibivirus 1, Human associated gemykibivirus 2, Human associated gemykibivirus 3, Human associated gemykibivirus 4, Human associated gemykibivirus 5, Mongoose associated gemykibivirus 1, Pteropus associated gemykibivirus 1, Rhinolophus associated gemykibivirus 1, Rhinolophus associated gemykibivirus 2, Sewage derived gemykibivirus 1, Sewage derived gemykibivirus 2, Pteropus associated gemykolovirus 1, Pteropus associated gemykolovirus 2, Bovine associated gemykrogvirus 1, Caribou associated gemykrogvirus 1, Sewage derived gemykrogvirus 1, Rabbit associated gemykroznavirus 1, Ostrich associated gemytondvirus 1, Human associated gemyvongvirus 1, Alphapleolipovirus HHPV1, Alphapleolipovirus HHPV2, Alphapleolipovirus HRPV1, Alphapleolipovirus HRPV2, Alphapleolipovirus HRPV6, Betapleolipovirus HGPV1, Betapleolipovirus HHPV3, Betapleolipovirus HHPV4, Betapleolipovirus HRPV3, Betapleolipovirus HRPV9, Betapleolipovirus HRPV10, Betapleolipovirus HRPV11, Betapleolipovirus HRPV12, Betapleolipovirus SNJ2, Gammapleolipovirus His2, Amasya cherry disease associated chrysovirus, Anthurium mosaic-associated chrysovirus, Aspergillus fumigatus chrysovirus, Brassica campestris chrysovirus, Colletotrichum gloeosporioides chrysovirus, Cryphonectria nitschkei chrysovirus 1, Fusarium oxysporum chrysovirus 1, Helminthosporium victoriae virus 145S, Isaria javanica chrysovirus, Macrophomina phaseolina chrysovirus, Penicillium brevicompactum virus, Penicillium chrysogenum virus, Penicillium cyaneofulvum virus, Persea americana chrysovirus, Raphanus sativus chrysovirus, Shuangao insect-associated chrysovirus, Verticillium dahliae chrysovirus 1, Alternaria alternata chrysovirus, Botryosphaeria dothidea chrysovirus, Colletotrichum fructicola chrysovirus 1, Fusarium graminearum chrysovirus, Fusarium oxysporum chrysovirus 2, Magnaporthe oryzae chrysovirus, Penicillium janczewskii chrysovirus 1, Penicillium janczewskii chrysovirus 2, Rosellinia necatrix megabirnavirus 1, Rosellinia necatrix quadrivirus 1, Giardia lamblia virus, Leishmania RNA virus 1, Leishmania RNA virus 2, Saccharomyces cerevisiae virus L-A, Saccharomyces cerevisiae virus LBCLa, Scheffersomyces segobiensis virus L, Tuber aestivum virus 1, Ustilago maydis virus H1, Xanthophyllomyces dendrorhous virus L₁A, Xanthophyllomyces dendrorhous virus L1B, Trichomonas vaginalis virus 1, Trichomonas vaginalis virus 2, Trichomonas vaginalis virus 3, Trichomonas vaginalis virus 4, Aspergillus foetidus slow virus 1, Beauveria bassiana victorivirus 1, Chalara elegans RNA Virus 1, Coniothyrium minitans RNA virus, Epichloe festucae virus 1, Gremmeniella abietina RNA virus L1, Helicobasidium mompa totivirus 1-17, Helminthosporium victoriae virus 190S, Magnaporthe oryzae virus 1, Magnaporthe oryzae virus 2, Rosellinia necatrix victorivirus 1, Sphaeropsis sapinea RNA virus 1, Sphaeropsis sapinea RNA virus 2, Tolypocladium cylindrosporum virus 1, Eriocheir sinensis reovirus, Micromonas pusilla reovirus, African horse sickness virus, Bluetongue virus, Changuinola virus, Chenuda virus, Chobar Gorge virus, Corriparta virus, Epizootic hemorrhagic disease virus, Equine encephalosis virus, Eubenangee virus, Great Island virus, Teri virus, Lebombo virus, Orungo virus, Palyam virus, Peruvian horse sickness virus, St Croix River virus, Umatilla virus, Wad Medani virus, Wallal virus, Warrego virus, Wongorr virus, Yunnan orbivirus, Rice dwarf virus, Rice gall dwarf virus, Wound tumor virus, Rotavirus A, Rotavirus B, Rotavirus C, Rotavirus D, Rotavirus F, Rotavirus G, Rotavirus H, Rotavirus I, Rotavirus J, Banna virus, Kadipiro virus, Liao ning virus, Aquareovirus A, Aquareovirus B, Aquareovirus C, Aquareovirus D, Aquareovirus E, Aquareovirus F, Aquareovirus G, Colorado tick fever coltivirus, Eyach coltivirus, Kundal coltivirus, Tai Forest coltivirus, Tarumizu coltivirus, Cypovirus 1, Cypovirus 2, Cypovirus 3, Cypovirus 4, Cypovirus 5, Cypovirus 6, Cypovirus 7, Cypovirus 8, Cypovirus 9, Cypovirus 10, Cypovirus 11, Cypovirus 12, Cypovirus 13, Cypovirus 14, Cypovirus 15, Cypovirus 16, Aedes pseudoscutellaris reovirus, Fiji disease virus, Garlic dwarf virus, Maize rough dwarf virus, Mal de Rio Cuarto virus, Nilaparvata lugens reovirus, Oat sterile dwarf virus, Pangola stunt virus, Rice black streaked dwarf virus, Southern rice black-streaked dwarf virus, Idnoreovirus 1, Idnoreovirus 2, Idnoreovirus 3, Idnoreovirus 4, Idnoreovirus 5, Mycoreovirus 1, Mycoreovirus 2, Mycoreovirus 3, Avian orthoreovirus, Baboon orthoreovirus, Broome orthoreovirus, Mahlapitsi orthoreovirus, Mammalian orthoreovirus, Nelson Bay orthoreovirus, Neoavian orthoreovirus, Piscine orthoreovirus, Reptilian orthoreovirus, Testudine orthoreovirus, Echinochloa ragged stunt virus, Rice ragged stunt virus, Pseudomonas virus phi6, Pseudomonas virus phi8, Pseudomonas virus phi12, Pseudomonas virus phi13, Pseudomonas virus phi2954, Pseudomonas virus phiNN, Pseudomonas virus phiYY, Antheraea eucalypti virus, Darna trima virus, Dasychira pudibunda virus, Nudaurelia capensis beta virus, Philosamia cynthia x ricini virus, Pseudoplusia includens virus, Trichoplusia ni virus, Dendrolimus punctatus virus, Helicoverpa armigera stunt virus, Nudaurelia capensis omega virus, Beet necrotic yellow vein virus, Beet soil-borne mosaic virus, Burdock mottle virus, Rice stripe necrosis virus, Orthohepevirus A, Orthohepevirus B, Orthohepevirus C, Orthohepevirus D, Piscihepevirus A, Rubella virus, Alfalfa mosaic virus, Amazon lily mild mottle virus, Pelargonium zonate spot virus, Broad bean mottle virus, Brome mosaic virus, Cassia yellow blotch virus, Cowpea chlorotic mottle virus, Melandrium yellow fleck virus, Spring beauty latent virus, Cucumber mosaic virus, Gayfeather mild mottle virus, Peanut stunt virus, Tomato aspermy virus, Ageratum latent virus, American plum line pattern virus, Apple mosaic virus, Asparagus virus 2, Blackberry chlorotic ringspot virus, Blueberry shock virus, Citrus leaf rugose virus, Citrus variegation virus, Elm mottle virus, Fragaria chiloensis latent virus, Humulus japonicus latent virus, Lilac leaf chlorosis virus, Lilac ring mottle virus, Parietaria mottle virus, Privet ringspot virus, Prune dwarf virus, Prunus necrotic ringspot virus, Spinach latent virus, Strawberry necrotic shock virus, Tobacco streak virus, Tomato necrotic streak virus, Tulare apple mosaic virus, Olive latent virus 2, Air potato ampelovirus 1, Blackberry vein banding-associated virus, Grapevine leafroll-associated virus 1, Grapevine leafroll-associated virus 3, Grapevine leafroll-associated virus 4, Grapevine leafroll-associated virus 13, Little cherry virus 2, Pineapple mealybug wilt-associated virus 1, Pineapple mealybug wilt-associated virus 2, Pineapple mealybug wilt-associated virus 3, Pistachio ampelovirus A, Plum bark necrosis stem pitting-associated virus, Arracacha virus 1, Beet yellow stunt virus, Beet yellows virus, Blackcurrant closterovirus 1, Burdock yellows virus, Carnation necrotic fleck virus, Carrot yellow leaf virus, Citrus tristeza virus, Grapevine leafroll-associated virus 2, Mint virus 1, Raspberry leaf mottle virus, Rehmannia virus 1, Rose leaf rosette-associated virus, Strawberry chlorotic fleck-associated virus, Tobacco virus 1, Wheat yellow leaf virus, Abutilon yellows virus, Bean yellow disorder virus, Beet pseudoyellows virus, Blackberry yellow vein-associated virus, Cucurbit yellow stunting disorder virus, Diodia vein chlorosis virus, Lettuce chlorosis virus, Lettuce infectious yellows virus, Potato yellow vein virus, Strawberry pallidosis-associated virus, Sweet potato chlorotic stunt virus, Tetterwort vein chlorosis virus, Tomato chlorosis virus, Tomato infectious chlorosis virus, Areca palm velarivirus 1, Cordyline virus 1, Cordyline virus 2, Cordyline virus 3, Cordyline virus 4, Grapevine leafroll-associated virus 7, Little cherry virus 1, Actinidia virus 1, Alligatorweed stunting virus, Blueberry virus A, Megakepasma mosaic virus, Mint vein banding-associated virus, Olive leaf yellowing-associated virus, Persimmon virus B, Agaricus bisporus alphaendornavirus 1, Basella alba alphaendornavirus 1, Bell pepper alphaendornavirus, Cluster bean alphaendornavirus 1, Cucumis melo alphaendornavirus, Erysiphe cichoracearum alphaendornavirus, Grapevine endophyte alphaendornavirus, Helianthus annuus alphaendornavirus, Helicobasidium mompa alphaendornavirus 1, Hordeum vulgare alphaendornavirus, Hot pepper alphaendornavirus, Lagenaria siceraria alphaendornavirus, Oryza rufipogon alphaendornavirus, Oryza sativa alphaendornavirus, Persea americana alphaendornavirus 1, Phaseolus vulgaris alphaendornavirus 1, Phaseolus vulgaris alphaendornavirus 2, Phaseolus vulgaris alphaendornavirus 3, Phytophthora alphaendornavirus 1, Rhizoctonia cerealis alphaendornavirus 1, Rhizoctonia solani alphaendornavirus 2, Vicia faba alphaendornavirus, Winged bean alphaendornavirus 1, Yerba mate alphaendornavirus, Alternaria brassicicola betaendornavirus 1, Botrytis cinerea betaendornavirus 1, Gremmeniella abietina betaendornavirus 1, Rosellinia necatrix betaendornavirus 1, Sclerotinia minor betaendornavirus 1, Sclerotinia sclerotiorum betaendornavirus 1, Tuber aestivum betaendornavirus, Blueberry necrotic ring blotch virus, Tea plant necrotic ring blotch virus, Citrus leprosis virus C, Citrus leprosis virus C2, Hibiscus green spot virus 2, Privet idaeovirus, Raspberry bushy dwarf virus, Japanese holly fern mottle pteridovirus, Maize associated pteridovirus, Aura virus, Barmah Forest virus, Bebaru virus, Cabassou virus, Chikungunya virus, Eastern equine encephalitis virus, Eilat virus, Everglades virus, Fort Morgan virus, Getah virus, Highlands J virus, Madariaga virus, Mayaro virus, Middelburg virus, Mosso das Pedras virus, Mucambo virus, Ndumu virus, Onyong-nyong virus, Pixuna virus, Rio Negro virus, Ross River virus, Salmon pancreas disease virus, Semliki Forest virus, Sindbis virus, Southern elephant seal virus, Tonate virus, Trocara virus, Una virus, Venezuelan equine encephalitis virus, Western equine encephalitis virus, Whataroa virus, Chinese wheat mosaic virus, Japanese soil-borne wheat mosaic virus, Oat golden stripe virus, Soil-borne cereal mosaic virus, Soil-borne wheat mosaic virus, Sorghum chlorotic spot virus, Drakaea virus A, Gentian ovary ringspot virus, Anthoxanthum latent blanching virus, Barley stripe mosaic virus, Lychnis ringspot virus, Poa semilatent virus, Indian peanut clump virus, Peanut clump virus, Beet soil-borne virus, Beet virus Q, Broad bean necrosis virus, Colombian potato soil-borne virus, Potato mop-top virus, Bell pepper mottle virus, Brugmansia mild mottle virus, Cactus mild mottle virus, Clitoria yellow mottle virus, Cucumber fruit mottle mosaic virus, Cucumber green mottle mosaic virus, Cucumber mottle virus, Frangipani mosaic virus, Hibiscus latent Fort Pierce virus, Hibiscus latent Singapore virus, Kyuri green mottle mosaic virus, Maracuj a mosaic virus, Obuda pepper virus, Odontoglossum ringspot virus, Opuntia chlorotic ringspot virus, Paprika mild mottle virus, Passion fruit mosaic virus, Pepper mild mottle virus, Plumeria mosaic virus, Rattail cactus necrosis-associated virus, Rehmannia mosaic virus, Ribgrass mosaic virus, Streptocarpus flower break virus, Sunn-hemp mosaic virus, Tobacco latent virus, Tobacco mild green mosaic virus, Tobacco mosaic virus, Tomato brown rugose fruit virus, Tomato mosaic virus, Tomato mottle mosaic virus, Tropical soda apple mosaic virus, Turnip vein-clearing virus, Ullucus mild mottle virus, Wasabi mottle virus, Yellow tailflower mild mottle virus, Youcai mosaic virus, Zucchini green mottle mosaic virus, Pea early-browning virus, Pepper ringspot virus, Tobacco rattle virus, Alfalfa virus S, Arachis pintoi virus, Blackberry virus E, Garlic mite-borne filamentous virus, Garlic virus A, Garlic virus B, Garlic virus C, Garlic virus D, Garlic virus E, Garlic virus X, Shallot virus X, Vanilla latent virus, Botrytis virus X, Lolium latent virus, Citrus yellow vein clearing virus, Indian citrus ringspot virus, Donkey orchid symptomless virus, Actinidia virus X, Allium virus X, Alstroemeria virus X, Alternanthera mosaic virus, Asparagus virus 3, Bamboo mosaic virus, Cactus virus X, Cassava common mosaic virus, Cassava virus X, Clover yellow mosaic virus, Cymbidium mosaic virus, Foxtail mosaic virus, Hosta virus X, Hydrangea ringspot virus, Lagenaria mild mosaic virus, Lettuce virus X, Lily virus X, Malva mosaic virus, Mint virus X, Narcissus mosaic virus, Nerine virus X, Opuntia virus X, Papaya mosaic virus, Pepino mosaic virus, Phaius virus X, Pitaya virus X, Plantago asiatica mosaic virus, Plantain virus X, Potato aucuba mosaic virus, Potato virus X, Schlumbergera virus X, Strawberry mild yellow edge virus, Tamus red mosaic virus, Tulip virus X, Vanilla virus X, White clover mosaic virus, Yam virus X, Zygocactus virus X, Sclerotinia sclerotiorum debilitation-associated RNA virus, Aconitum latent virus, American hop latent virus, Atractylodes mottle virus, Blueberry scorch virus, Butterbur mosaic virus, Cactus virus 2, Caper latent virus, Carnation latent virus, Chrysanthemum virus B, Cole latent virus, Coleus vein necrosis virus, Cowpea mild mottle virus, Cucumber vein-clearing virus, Daphne virus S, Gaillardia latent virus, Garlic common latent virus, Helenium virus S, Helleborus mosaic virus, Helleborus net necrosis virus, Hippeastrum latent virus, Hop latent virus, Hop mosaic virus, Hydrangea chlorotic mottle virus, Kalanchoe latent virus, Ligustrum necrotic ringspot virus, Ligustrum virus A, Lily symptomless virus, Melon yellowing-associated virus, Mirabilis jalapa mottle virus, Narcissus common latent virus, Nerine latent virus, Passiflora latent virus, Pea streak virus, Phlox virus B, Phlox virus M, Phlox virus S, Poplar mosaic virus, Potato latent virus, Potato virus H, Potato virus M, Potato virus P, Potato virus S, Red clover vein mosaic virus, Sambucus virus C, Sambucus virus D, Sambucus virus E, Shallot latent virus, Sint-Jan onion latent virus, Strawberry pseudo mild yellow edge virus, Sweet potato C6 virus, Sweet potato chlorotic fleck virus, Verbena latent virus, Yam latent virus, Apple stem pitting virus, Apricot latent virus, Asian prunus virus 1, Asian prunus virus 2, Grapevine rupestris stem pitting-associated virus, Grapevine virus T, Peach chlorotic mottle virus, Rubus canadensis virus 1, African oil palm ringspot virus, Cherry green ring mottle virus, Cherry necrotic rusty mottle virus, Cherry rusty mottle associated virus, Cherry twisted leaf associated virus, Banana mild mosaic virus, Banana virus X, Sugarcane striate mosaic-associated virus, Apple stem grooving virus, Cherry virus A, Currant virus A, Mume virus A, Carrot Ch virus 1, Carrot Ch virus 2, Citrus leaf blotch virus, Diuris virus A, Diuris virus B, Hardenbergia virus A, Actinidia seed borne latent virus, Apricot vein clearing associated virus, Caucasus prunus virus, Ribes americanum virus A, Potato virus T, Prunus virus T, Apple chlorotic leaf spot virus, Apricot pseudo-chlorotic leaf spot virus, Cherry mottle leaf virus, Grapevine berry inner necrosis virus, Grapevine Pinot gris virus, Peach mosaic virus, Phlomis mottle virus, Actinidia virus A, Actinidia virus B, Arracacha virus V, Blackberry virus A, Grapevine virus A, Grapevine virus B, Grapevine virus D, Grapevine virus E, Grapevine virus F, Grapevine virus G, Grapevine virus H, Grapevine virus I, Grapevine virus J, Heracleum latent virus, Mint virus 2, Watermelon virus A, Fusarium deltaflexivirus 1, Sclerotinia deltaflexivirus 1, Soybean-associated deltaflexivirus 1, Botrytis virus F, Grapevine fleck virus, Bermuda grass etched-line virus, Blackberry virus S, Citrus sudden death-associated virus, Grapevine asteroid mosaic associated virus, Grapevine Syrah virus 1, Maize rayado fino virus, Nectarine marafivirus M, Oat blue dwarf virus, Olive latent virus 3, Peach marafivirus D, Anagyris vein yellowing virus, Andean potato latent virus, Andean potato mild mosaic virus, Belladonna mottle virus, Cacao yellow mosaic virus, Calopogonium yellow vein virus, Chayote mosaic virus, Chiltepin yellow mosaic virus, Clitoria yellow vein virus, Desmodium yellow mottle virus, Dulcamara mottle virus, Eggplant mosaic virus, Erysimum latent virus, Kennedya yellow mosaic virus, Melon rugose mosaic virus, Nemesia ring necrosis virus, Okra mosaic virus, Ononis yellow mosaic virus, Passion fruit yellow mosaic virus, Peanut yellow mosaic virus, Petunia vein banding virus, Physalis mottle virus, Plantago mottle virus, Scrophularia mottle virus, Tomato blistering mosaic tymovirus, Turnip yellow mosaic virus, Voandzeia necrotic mosaic virus, Wild cucumber mosaic virus, Bombyx mori latent virus, Poinsettia mosaic virus, Apoi virus, Aroa virus, Bagaza virus, Banzi virus, Bouboui virus, Bukalasa bat virus, Cacipacore virus, Carey Island virus, Cowbone Ridge virus, Dakar bat virus, Dengue virus, Edge Hill virus, Entebbe bat virus, Gadgets Gully virus, Ilheus virus, Israel turkey meningoencephalomyelitis virus, Japanese encephalitis virus, Jugra virus, Jutiapa virus, Kadam virus, Kedougou virus, Kokobera virus, Koutango virus, Kyasanur Forest disease virus, Langat virus, Louping ill virus, Meaban virus, Modoc virus, Montana myotis leukoencephalitis virus, Murray Valley encephalitis virus, Ntaya virus, Omsk hemorrhagic fever virus, Phnom Penh bat virus, Powassan virus, Rio Bravo virus, Royal Farm virus, Saboya virus, Saint Louis encephalitis virus, Sal Vieja virus, San Perlita virus, Saumarez Reef virus, Sepik virus, Tembusu virus, Tick-borne encephalitis virus, Tyuleniy virus, Uganda S virus, Usutu virus, Wesselsbron virus, West Nile virus, Yaounde virus, Yellow fever virus, Yokose virus, Zika virus, Hepacivirus A, Hepacivirus B, Hepacivirus C, Hepacivirus D, Hepacivirus E, Hepacivirus F, Hepacivirus G, Hepacivirus H, Hepacivirus I, Hepacivirus J, Hepacivirus K, Hepacivirus L, Hepacivirus M, Hepacivirus N, Pegivirus A, Pegivirus B, Pegivirus C, Pegivirus D, Pegivirus E, Pegivirus F, Pegivirus G, Pegivirus H, Pegivirus I, Pegivirus J, Pegivirus K, Pestivirus A, Pestivirus B, Pestivirus C, Pestivirus D, Pestivirus E, Pestivirus F, Pestivirus G, Pestivirus H, Pestivirus I, Pestivirus J, Pestivirus K, Black beetle virus, Boolarra virus, Flock House virus, Nodamura virus, Pariacoto virus, Barfin flounder nervous necrosis virus, Redspotted grouper nervous necrosis virus, Striped jack nervous necrosis virus, Tiger puffer nervous necrosis virus, Lake Sinai virus 1, Lake Sinai virus 2, Providence virus, Alfalfa enamovirus 1, Birdsfoot trefoil enamovirus 1, Citrus vein enation virus, Grapevine enamovirus 1, Pea enation mosaic virus 1, Apple associated luteovirus, Apple luteovirus 1, Barley yellow dwarf virus kerII, Barley yellow dwarf virus kerIII, Barley yellow dwarf virus MAV, Barley yellow dwarf virus PAS, Barley yellow dwarf virus PAV, Bean leafroll virus, Cherry associated luteovirus, Nectarine stem pitting associated virus, Red clover associated luteovirus, Rose spring dwarf-associated virus, Soybean dwarf virus, Beet chlorosis virus, Beet mild yellowing virus, Beet western yellows virus, Carrot red leaf virus, Cereal yellow dwarf virus RPS, Cereal yellow dwarf virus RPV, Chickpea chlorotic stunt virus, Cotton leafroll dwarf virus, Cucurbit aphid-borne yellows virus, Faba bean polerovirus 1, Maize yellow dwarf virus RMV, Maize yellow mosaic virus, Melon aphid-borne yellows virus, Pepo aphid-borne yellows virus, Pepper vein yellows virus 1, Pepper vein yellows virus 2, Pepper vein yellows virus 3, Pepper vein yellows virus 4, Pepper vein yellows virus 5, Pepper vein yellows virus 6, Potato leafroll virus, Pumpkin polerovirus, Suakwa aphid-borne yellows virus, Sugarcane yellow leaf virus, Tobacco vein distorting virus, Turnip yellows virus, Barley yellow dwarf virus GPV, Barley yellow dwarf virus SGV, Chickpea stunt disease associated virus, Groundnut rosette assistor virus, Indonesian soybean dwarf virus, Sweet potato leaf speckling virus, Tobacco necrotic dwarf virus, Carrot mottle mimic virus, Carrot mottle virus, Ethiopian tobacco bushy top virus, Groundnut rosette virus, Lettuce speckles mottle virus, Opium poppy mosaic virus, Pea enation mosaic virus 2, Tobacco bushy top virus, Tobacco mottle virus, Angelonia flower break virus, Calibrachoa mottle virus, Carnation mottle virus, Honeysuckle ringspot virus, Nootka lupine vein clearing virus, Pelargonium flower break virus, Saguaro cactus virus, Olive latent virus 1, Olive mild mosaic virus, Potato necrosis virus, Tobacco necrosis virus A, Cucumber leaf spot virus, Johnsongrass chlorotic stripe mosaic virus, Maize white line mosaic virus, Pothos latent virus, Yam spherical virus, Oat chlorotic stunt virus, Cardamine chlorotic fleck virus, Hibiscus chlorotic ringspot virus, Japanese iris necrotic ring virus, Turnip crinkle virus, Beet black scorch virus, Leek white stripe virus, Tobacco necrosis virus D, Galinsoga mosaic virus, Cowpea mottle virus, Melon necrotic spot virus, Pea stem necrosis virus, Soybean yellow mottle mosaic virus, Furcraea necrotic streak virus, Maize chlorotic mottle virus, Cocksfoot mild mosaic virus, Panicum mosaic virus, Thin paspalum asymptomatic virus, Clematis chlorotic mottle virus, Elderberry latent virus, Pelargonium chlorotic ring pattern virus, Pelargonium line pattern virus, Pelargonium ringspot virus, Rosa rugosa leaf distortion virus, Artichoke mottled crinkle virus, Carnation Italian ringspot virus, Cucumber Bulgarian latent virus, Cucumber necrosis virus, Cymbidium ringspot virus, Eggplant mottled crinkle virus, Grapevine Algerian latent virus, Havel River virus, Lato River virus, Limonium flower distortion virus, Moroccan pepper virus, Neckar River virus, Pelargonium leaf curl virus, Pelargonium necrotic spot virus, Petunia asteroid mosaic virus, Sitke waterborne virus, Tomato bushy stunt virus, Maize necrotic streak virus, Ahlum waterborne virus, Bean mild mosaic virus, Chenopodium necrosis virus, Cucumber soil-borne virus, Trailing lespedeza virus 1, Weddel waterborne virus, Carnation ringspot virus, Red clover necrotic mosaic virus, Sweet clover necrotic mosaic virus, Escherichia virus FI, Escherichia virus Qbeta, Escherichia virus BZ13, Escherichia virus MS2, Saccharomyces 20S RNA narnavirus, Saccharomyces 23S RNA narnavirus, Cryphonectria mitovirus 1, Ophiostoma mitovirus 4, Ophiostoma mitovirus 5, Ophiostoma mitovirus 6, Ophiostoma mitovirus 3a, Botrytis botoulivirus, Sclerotinia botoulivirus 2, Magnaporthe magoulivirus 1, Rhizoctonia magoulivirus 1, Cassava virus C, Epirus cherry virus, Ourmia melon virus, Sclerotinia scleroulivirus 1, Soybean scleroulivirus 1, Soybean scleroulivirus 2, Beihai yingvirus, Charybdis yingvirus, Hubei yingvirus, Sanxia yingvirus, Shahe yingvirus, Wenzhou yingvirus, Wuhan yingvirus, Xinzhou yingvirus, Blueberry mosaic associated ophiovirus, Citrus psorosis ophiovirus, Freesia sneak ophiovirus, Lettuce ring necrosis ophiovirus, Mirafiori lettuce big-vein ophiovirus, Ranunculus white mottle ophiovirus, Tulip mild mottle mosaic ophiovirus, Argas mivirus, Barnacle mivirus, Beetle mivirus, Bole mivirus, Brunnich mivirus, Changping mivirus, Charybdis mivirus, Cockroach mivirus, Crab mivirus, Crustacean mivirus, Dermacentor mivirus, Hermit mivirus, Hippoboscid mivirus, Hubei mivirus, Hubei odonate mivirus, Imjin mivirus, Lacewing mivirus, Lishi mivirus, Lonestar mivirus, Louse fly mivirus, Mosquito mivirus, Myriapod mivirus, Odonate mivirus, Sanxia mivirus, Shayang mivirus, Suffolk mivirus, Taiyuan mivirus, Wenling mivirus, Wuhan mivirus, Xinzhou mivirus, Barnacle hexartovirus, Caligid hexartovirus, Beihai peropuvirus, Hubei peropuvirus, Odonate peropuvirus, Pillworm peropuvirus, Pteromalus puparum peropuvirus, Woodlouse peropuvirus, Queensland carbovirus, Southwest carbovirus, Sharpbelly cultervirus, Elapid 1 orthobornavirus, Mammalian 1 orthobornavirus, Mammalian 2 orthobornavirus, Passeriform 1 orthobornavirus, Passeriform 2 orthobornavirus, Psittaciform 1 orthobornavirus, Psittaciform 2 orthobornavirus, Waterbird 1 orthobornavirus, Lloviu cuevavirus, Mengla dianlovirus, Bombali ebolavirus, Bundibugyo ebolavirus, Reston ebolavirus, Sudan ebolavirus, Tai Forest ebolavirus, Zaire ebolavirus, Marburg marburgvirus, Xilang striavirus, Huangjiao thamnovirus, Gerrid arlivirus, Hubei arlivirus, Lishi arlivirus, Odonate arlivirus, Tacheng arlivirus, Wuchang arlivirus, Hubei hubramonavirus, Lentinula hubramonavirus, Dadou sclerotimonavirus, Drop sclerotimonavirus, Glycine sclerotimonavirus, Hubei sclerotimonavirus, Illinois sclerotimonavirus, Phyllosphere sclerotimonavirus, Sclerotinia sclerotimonavirus, Beihai berhavirus, Echinoderm berhavirus, Sipunculid berhavirus, Beihai crustavirus, Wenling crustavirus, Wenzhou crustavirus, Midway nyavirus, Nyamanini nyavirus, Sierra Nevada nyavirus, Orinoco orinovirus, Soybean cyst nematode socyvirus, Tapeworm tapwovirus, Avian metaavulavirus 2, Avian metaavulavirus 5, Avian metaavulavirus 6, Avian metaavulavirus 7, Avian metaavulavirus 8, Avian metaavulavirus 10, Avian metaavulavirus 11, Avian metaavulavirus 14, Avian metaavulavirus 15, Avian metaavulavirus 20, Avian orthoavulavirus 1, Avian orthoavulavirus 9, Avian orthoavulavirus 12, Avian orthoavulavirus 13, Avian orthoavulavirus 16, Avian orthoavulavirus 17, Avian orthoavulavirus 18, Avian orthoavulavirus 19, Avian orthoavulavirus 21, Avian orthovulavirus 21, Avian paraavulavirus 3, Avian paraavulavirus 4, Synodus synodonvirus, Oncorhynchus aquaparamyxovirus, Salmo aquaparamyxovirus, Reptilian ferlavirus, Cedar henipavirus, Ghanaian bat henipavirus, Hendra henipavirus, Mojiang henipavirus, Nipah henipavirus, Beilong jeilongvirus, Jun jeilongvirus, Lophuromys jeilongvirus 1, Lophuromys jeilongvirus 2, Miniopteran jeilongvirus, Myodes jeilongvirus, Tailam jeilongvirus, Canine morbillivirus, Cetacean morbillivirus, Feline morbillivirus, Measles morbillivirus, Phocine morbillivirus, Rinderpest morbillivirus, Small ruminant morbillivirus, Mossman narmovirus, Myodes narmovirus, Nariva narmovirus, Tupaia narmovirus, Bovine respirovirus 3, Caprine respirovirus 3, Human respirovirus 1, Human respirovirus 3, Murine respirovirus, Porcine respirovirus 1, Squirrel respirovirus, Salem salemvirus, Human orthorubulavirus 2, Human orthorubulavirus 4, Mammalian orthorubulavirus 5, Mammalian orthorubulavirus 6, Mapuera orthorubulavirus, Mumps orthorubulavirus, Porcine orthorubulavirus, Simian orthorubulavirus, Achimota pararubulavirus 1, Achimota pararubulavirus 2, Hervey pararubulavirus, Menangle pararubulavirus, Sosuga pararubulavirus, Teviot pararubulavirus, Tioman pararubulavirus, Tuhoko pararubulavirus 1, Tuhoko pararubulavirus 2, Tuhoko pararubulavirus 3, Cynoglossus cynoglossusvirus, Hoplichthys hoplichthysvirus, Scoliodon scoliodonvirus, Avian metapneumovirus, Human metapneumovirus, Bovine orthopneumovirus, Human orthopneumovirus, Murine orthopneumovirus, Arboretum almendravirus, Balsa almendravirus, Coot Bay almendravirus, Menghai almendravirus, Puerto Almendras almendravirus, Rio Chico almendravirus, Xingshan alphanemrhavirus, Xinzhou alphanemrhavirus, Eggplant mottled dwarf alphanucleorhabdovirus, Maize Iranian mosaic alphanucleorhabdovirus, Maize mosaic alphanucleorhabdovirus, Morogoro maize-associated alphanucleorhabdovirus, Physostegia chlorotic mottle alphanucleorhabdovirus, Potato yellow dwarf alphanucleorhabdovirus, Rice yellow stunt alphanucleorhabdovirus, Taro vein chlorosis alphanucleorhabdovirus, Wheat yellow striate alphanucleorhabdovirus, Aruac arurhavirus, Inhangapi arurhavirus, Santabarbara arurhavirus, Xiburema arurhavirus, Bahia barhavirus, Muir barhavirus, Alfalfa betanucleorhabdovirus, Blackcurrant betanucleorhabdovirus, Datura yellow vein betanucleorhabdovirus, Sonchus yellow net betanucleorhabdovirus, Sowthistle yellow vein betanucleorhabdovirus, Trefoil betanucleorhabdovirus, Caligus caligrhavirus, Lepeophtheirus caligrhavirus, Salmonlouse caligrhavirus, Curionopolis curiovirus, Iriri curiovirus, Itacaiunas curiovirus, Rochambeau curiovirus, Alfalfa dwarf cytorhabdovirus, Barley yellow striate mosaic cytorhabdovirus, Broccoli necrotic yellows cytorhabdovirus, Cabbage cytorhabdovirus, Colocasia bobone disease-associated cytorhabdovirus, Festuca leaf streak cytorhabdovirus, Lettuce necrotic yellows cytorhabdovirus, Lettuce yellow mottle cytorhabdovirus, Maize yellow striate cytorhabdovirus, Maize-associated cytorhabdovirus, Northern cereal mosaic cytorhabdovirus, Papaya cytorhabdovirus, Persimmon cytorhabdovirus, Raspberry vein chlorosis cytorhabdovirus, Rice stripe mosaic cytorhabdovirus, Sonchus cytorhabdovirus 1, Strawberry crinkle cytorhabdovirus, Tomato yellow mottle-associated cytorhabdovirus, Wheat American striate mosaic cytorhabdovirus, Wuhan 4 insect cytorhabdovirus, Wuhan 5 insect cytorhabdovirus, Wuhan 6 insect cytorhabdovirus, Yerba mate chlorosis-associated cytorhabdovirus, Citrus chlorotic spot dichorhavirus, Citrus leprosis N dichorhavirus, Clerodendrum chlorotic spot dichorhavirus, Coffee ringspot dichorhavirus, Orchid fleck dichorhavirus, Adelaide River ephemerovirus, Berrimah ephemerovirus, Bovine fever ephemerovirus, Kimberley ephemerovirus, Koolpinyah ephemerovirus, Kotonkan ephemerovirus, Obodhiang ephemerovirus, Yata ephemerovirus, Maize fine streak gammanucleorhabdovirus, Flanders hapavirus, Gray Lodge hapavirus, Hart Park hapavirus, Holmes hapavirus, Joinjakaka hapavirus, Kamese hapavirus, La Joya hapavirus, Landjia hapavirus, Manitoba hapavirus, Marco hapavirus, Mosqueiro hapavirus, Mossuril hapavirus, Ngaingan hapavirus, Ord River hapavirus, Parry Creek hapavirus, Wongabel hapavirus, Barur ledantevirus, Fikirini ledantevirus, Fukuoka ledantevirus, Kanyawara ledantevirus, Kern Canyon ledantevirus, Keuraliba ledantevirus, Kolente ledantevirus, Kumasi ledantevirus, Le Dantec ledantevirus, Mount Elgon bat ledantevirus, Nishimuro ledantevirus, Nkolbisson ledantevirus, Oita ledantevirus, Vaprio ledantevirus, Wuhan ledantevirus, Yongjia ledantevirus, Lonestar zarhavirus, Aravan lyssavirus, Australian bat lyssavirus, Bokeloh bat lyssavirus, Duvenhage lyssavirus, European bat 1 lyssavirus, European bat 2 lyssavirus, Gannoruwa bat lyssavirus, Ikoma lyssavirus, Irkut lyssavirus, Khuj and lyssavirus, Lagos bat lyssavirus, Lleida bat lyssavirus, Mokola lyssavirus, Rabies lyssavirus, Shimoni bat lyssavirus, Taiwan bat lyssavirus, West Caucasian bat lyssavirus, Moussa mousrhavirus, Hirame novirhabdovirus, Piscine novirhabdovirus, Salmonid novirhabdovirus, Snakehead novirhabdovirus, Culex ohlsrhavirus, Northcreek ohlsrhavirus, Ohlsdorf ohlsrhavirus, Riverside ohlsrhavirus, Tongilchon ohlsrhavirus, Anguillid perhabdovirus, Perch perhabdovirus, Sea trout perhabdovirus, Connecticut sawgrhavirus, Island sawgrhavirus, Minto sawgrhavirus, Sawgrass sawgrhavirus, Drosophila affinis sigmavirus, Drosophila ananassae sigmavirus, Drosophila immigrans sigmavirus, Drosophila melanogaster sigmavirus, Drosophila obscura sigmavirus, Drosophila tristis sigmavirus, Muscina stabulans sigmavirus, Carp sprivivirus, Pike fry sprivivirus, Almpiwar sripuvirus, Chaco sripuvirus, Charleville sripuvirus, Cuiaba sripuvirus, Hainan sripuvirus, Niakha sripuvirus, Sena Madureira sripuvirus, Sripur sripuvirus, Garba sunrhavirus, Harrison sunrhavirus, Kwatta sunrhavirus, Oakvale sunrhavirus, Sunguru sunrhavirus, Walkabout sunrhavirus, Bas-Congo tibrovirus, Beatrice Hill tibrovirus, Coastal Plains tibrovirus, Ekpoma 1 tibrovirus, Ekpoma 2 tibrovirus, Sweetwater Branch tibrovirus, Tibrogargan tibrovirus, Durham tupavirus, Klamath tupavirus, Tupaia tupavirus, Lettuce big-vein associated varicosavirus, Alagoas vesiculovirus, American bat vesiculovirus, Carajas vesiculovirus, Chandipura vesiculovirus, Cocal vesiculovirus, Indiana vesiculovirus, Isfahan vesiculovirus, Jurona vesiculovirus, Malpais Spring vesiculovirus, Maraba vesiculovirus, Morreton vesiculovirus, New Jersey vesiculovirus, Perinet vesiculovirus, Piry vesiculovirus, Radi vesiculovirus, Yug Bogdanovac vesiculovirus, Zahedan zarhavirus, Reptile sunshinevirus 1, Bolahun anphevirus, Dipteran anphevirus, Drosophilid anphevirus, Odonate anphevirus, Orthopteran anphevirus, Shuangao anphevirus, Xincheng anphevirus, Beihai yuyuevirus, Shahe yuyuevirus, Hairy antennavirus, Striated antennavirus, Haartman hartmanivirus, Muikkunen hartmanivirus, Schoolhouse hartmanivirus, Zurich hartmanivirus, Allpahuayo mammarenavirus, Alxa mammarenavirus, Argentinian mammarenavirus, Bear Canyon mammarenavirus, Brazilian mammarenavirus, Cali mammarenavirus, Chapare mammarenavirus, Chevrier mammarenavirus, Cupixi mammarenavirus, Flexal mammarenavirus, Gairo mammarenavirus, Guanarito mammarenavirus, Ippy mammarenavirus, Lassa mammarenavirus, Latino mammarenavirus, Loei River mammarenavirus, Lujo mammarenavirus, Luna mammarenavirus, Lunk mammarenavirus, Lymphocytic choriomeningitis mammarenavirus, Machupo mammarenavirus, Mariental mammarenavirus, Merino Walk mammarenavirus, Mobala mammarenavirus, Mopeia mammarenavirus, Okahandj a mammarenavirus, Oliveros mammarenavirus, Paraguayan mammarenavirus, Pirital mammarenavirus, Planalto mammarenavirus, Ryukyu mammarenavirus, Serra do Navio mammarenavirus, Solwezi mammarenavirus, Souris mammarenavirus, Tacaribe mammarenavirus, Tamiami mammarenavirus, Wenzhou mammarenavirus, Whitewater Arroyo mammarenavirus, Xapuri mammarenavirus, California reptarenavirus, Giessen reptarenavirus, Golden reptarenavirus, Ordinary reptarenavirus, Rotterdam reptarenavirus, Crustacean lincruvirus, Actinidia chlorotic ringspot-associated emaravirus, Blackberry leaf mottle associated emaravirus, European mountain ash ringspot-associated emaravirus, Fig mosaic emaravirus, High Plains wheat mosaic emaravirus, Pigeonpea sterility mosaic emaravirus 1, Pigeonpea sterility mosaic emaravirus 2, Pistacia emaravirus B, Raspberry leaf blotch emaravirus, Redbud yellow ringspot-associated emaravirus, Rose rosette emaravirus, Batfish actinovirus, Goosefish actinovirus, Spikefish actinovirus, Hagfish agnathovirus, Brno loanvirus, Longquan loanvirus, Laibin mobatvirus, Nova mobatvirus, Quezon mobatvirus, Andes orthohantavirus, Asama orthohantavirus, Asikkala orthohantavirus, Bayou orthohantavirus, Black Creek Canal orthohantavirus, Bowe orthohantavirus, Bruges orthohantavirus, Cano Delgadito orthohantavirus, Cao Bang orthohantavirus, Choclo orthohantavirus, Dabieshan orthohantavirus, Dobrava-Belgrade orthohantavirus, El Moro Canyon orthohantavirus, Fugong orthohantavirus, Fusong orthohantavirus, Hantaan orthohantavirus, Jeju orthohantavirus, Kenkeme orthohantavirus, Khabarovsk orthohantavirus, Laguna Negra orthohantavirus, Luxi orthohantavirus, Maporal orthohantavirus, Montano orthohantavirus, Necocli orthohantavirus, Oxbow orthohantavirus, Prospect Hill orthohantavirus, Puumala orthohantavirus, Rockport orthohantavirus, Sangassou orthohantavirus, Seewis orhtohantavirus, Seoul orthohantavirus, Sin Nombre orthohantavirus, Thailand orthohantavirus, Tigray orthohantavirus, Tula orthohantavirus, Yakeshi orthohantavirus, Imjin thottimvirus, Thottopalayam thottimvirus, Gecko reptillovirus, Leptomonas shilevirus, Myriapod hubavirus, Artashat orthonairovirus, Chim orthonairovirus, Crimean-Congo hemorrhagic fever orthonairovirus, Dera Ghazi Khan orthonairovirus, Dugbe orthonairovirus, Estero Real orthonairovirus, Hazara orthonairovirus, Hughes orthonairovirus, Kasokero orthonairovirus, Keterah orthonairovirus, Nairobi sheep disease orthonairovirus, Qalyub orthonairovirus, Sakhalin orthonairovirus, Tamdy orthonairovirus, Thiafora orthonairovirus, Spider shaspivirus, Strider striwavirus, Herbert herbevirus, Kibale herbevirus, Tai herbevirus, Acara orthobunyavirus, Aino orthobunyavirus, Akabane orthobunyavirus, Alajuela orthobunyavirus, Anadyr orthobunyavirus, Anhembi orthobunyavirus, Anopheles A orthobunyavirus, Anopheles B orthobunyavirus, Bakau orthobunyavirus, Batai orthobunyavirus, Batama orthobunyavirus, Bellavista orthobunyavirus, Benevides orthobunyavirus, Bertioga orthobunyavirus, Bimiti orthobunyavirus, Birao orthobunyavirus, Botambi orthobunyavirus, Bozo orthobunyavirus, Bunyamwera orthobunyavirus, Bushbush orthobunyavirus, Buttonwillow orthobunyavirus, Bwamba orthobunyavirus, Cache Valley orthobunyavirus, Cachoeira Porteira orthobunyavirus, California encephalitis orthobunyavirus, Capim orthobunyavirus, Caraparu orthobunyavirus, Cat Que orthobunyavirus, Catu orthobunyavirus, Enseada orthobunyavirus, Faceys paddock orthobunyavirus, Fort Sherman orthobunyavirus, Gamboa orthobunyavirus, Guajara orthobunyavirus, Guama orthobunyavirus, Guaroa orthobunyavirus, Iaco orthobunyavirus, Ilesha orthobunyavirus, Ingwavuma orthobunyavirus, Jamestown Canyon orthobunyavirus, Jatobal orthobunyavirus, Kaeng Khoi orthobunyavirus, Kairi orthobunyavirus, Keystone orthobunyavirus, Koongol orthobunyavirus, La Crosse orthobunyavirus, Leanyer orthobunyavirus, Lumbo orthbunyavirus, Macaua orthobunyavirus, Madrid orthobunyavirus, Maguari orthobunyavirus, Main Drain orthobunyavirus, Manzanilla orthobunyavirus, Marituba orthobunyavirus, Melao orthobunyavirus, Mermet orthobunyavirus, Minatitlan orthobunyavirus, MPoko orthobunyavirus, Nyando orthobunyavirus, Olifantsvlei orthobunyavirus, Oriboca orthobunyavirus, Oropouche orthobunyavirus, Patois orthobunyavirus, Peaton orthobunyavirus, Potosi orthobunyavirus, Sabo orthobunyavirus, San Angelo orthobunyavirus, Sango orthobunyavirus, Schmallenberg orthobunyavirus, Serra do Navio orthobunyavirus, Shuni orthobunyavirus, Simbu orthobunyavirus, Snowshoe hare orthobunyavirus, Sororoca orthobunyavirus, Tacaiuma orthobunyavirus, Tahyna orthobunyavirus, Tataguine orthobunyavirus, Tensaw orthobunyavirus, Tete orthobunyavirus, Thimiri orthobunyavirus, Timboteua orthobunyavirus, Trivittatus orthobunyavirus, Turlock orthobunyavirus, Utinga orthobunyavirus, Witwatersrand orthobunyavirus, Wolkberg orthobunyavirus, Wyeomyia orthobunyavirus, Zegla orthobunyavirus, Caimito pacuvirus, Chilibre pacuvirus, Pacui pacuvirus, Rio Preto da Eva pacuvirus, Tapirape pacuvirus, Insect shangavirus, Ferak feravirus, Jonchet jonvirus, Anopheles orthophasmavirus, Culex orthophasmavirus, Ganda orthophasmavirus, Kigluaik phantom orthophasmavirus, Odonate orthophasmavirus, Qingling orthophasmavirus, Wuchang cockroach orthophasmavirus 1, Wuhan mosquito orthophasmavirus 1, Wuhan mosquito orthophasmavirus 2, Sanxia sawastrivirus, Insect wuhivirus, Bhanja bandavirus, Dabie bandavirus, Guertu bandavirus, Heartland bandavirus, Hunter Island bandavirus, Kismaayo bandavirus, Lone Star bandavirus, Dipteran beidivirus, Citrus coguvirus, Coguvirus eburi, Entoleuca entovirus, Cumuto goukovirus, Gouleako goukovirus, Yichang insect goukovirus, Horsefly horwuvirus, Dipteran hudivirus, Lepidopteran hudovirus, Blackleg ixovirus, Norway ixovirus, Scapularis ixovirus, Laurel Lake laulavirus, Lentinula lentinuvirus, Mothra mobuvirus, Badu phasivirus, Dipteran phasivirus, Fly phasivirus, Phasi Charoen-like phasivirus, Wutai mosquito phasivirus, Adana phlebovirus, Aguacate phlebovirus, Alcube phlebovirus, Alenquer phlebovirus, Ambe phlebovirus, Anhanga phlebovirus, Arumowot phlebovirus, Buenaventura phlebovirus, Buj am phlebovirus, Cacao phlebovirus, Campana phlebovirus, Candiru phlebovirus, Chagres phlebovirus, Code phlebovirus, Dashli phlebovirus, Durania phlebovirus, Echarate phlebovirus, Frijoles phlebovirus, Gabek phlebovirus, Gordil phlebovirus, Icoaraci phlebovirus, Itaituba phlebovirus, Itaporanga phlebovirus, Ixcanal phlebovirus, Karimabad phlebovirus, La Gloria phlebovirus, Lara phlebovirus, Leticia phlebovirus, Maldonado phlebovirus, Massilia phlebovirus, Medjerda phlebovirus, Mona Grita phlebovirus, Mukawa phlebovirus, Munguba phlebovirus, Naples phlebovirus, Nique phlebovirus, Ntepes phlebovirus, Odrenisrou phlebovirus, Oriximina phlebovirus, Pena Blanca phlebovirus, Punique phlebovirus, Punta Toro phlebovirus, Rift Valley fever phlebovirus, Rio Grande phlebovirus, Saint Floris phlebovirus, Salanga phlebovirus, Salehabad phlebovirus, Salobo phlabovirus, Sicilian phlebovirus, Tapara phlebovirus, Tehran phlebovirus, Tico phebovirus, Toros phlebovirus, Toscana phlebovirus, Tres Almendras phlebovirus, Turuna phlebovirus, Uriurana phlebovirus, Urucuri phlebovirus, Viola phlebovirus, Zerdali phlebovirus, Pidgey pidchovirus, Apple rubodvirus 1, Apple rubodvirus 2, Echinochloa hoja blanca tenuivirus, Iranian wheat stripe tenuivirus, Maize stripe tenuivirus, Melon tenuivirus, Rice grassy stunt tenuivirus, Rice hoja blanca tenuivirus, Rice stripe tenuivirus, Urochloa hoja blanca tenuivirus, American dog uukuvirus, Dabieshan uukuvirus, Grand Arbaud uukuvirus, Huangpi uukuvirus, Kabuto mountain uukuvirus, Kaisodi uukuvirus, Lihan uukuvirus, Murre uukuvirus, Pacific coast uukuvirus, Precarious Point uukuvirus, Rukutama uukuvirus, Schmidt uukuvirus, Silverwater uukuvirus, Tacheng uukuvirus, Uukuniemi uukuvirus, Yongjia uukuvirus, Zaliv Terpeniya uukuvirus, Shrimp wenrivirus, Alstroemeria necrotic streak orthotospovirus, Alstroemeria yellow spot orthotospovirus, Bean necrotic mosaic orthotospovirus, Calla lily chlorotic spot orthotospovirus, Capsicum chlorosis orthotospovirus, Chrysanthemum stem necrosis orthotospovirus, Groundnut bud necrosis orthotospovirus, Groundnut chlorotic fan spot orthotospovirus, Groundnut ringspot orthotospovirus, Groundnut yellow spot orthotospovirus, Hippeastrum chlorotic ringspot orthotospovirus, Impatiens necrotic spot orthotospovirus, Iris yellow spot orthotospovirus, Melon severe mosaic orthotospovirus, Melon yellow spot orthotospovirus, Mulberry vein banding associated orthotospovirus, Pepper chlorotic spot orthotospovirus, Polygonum ringspot orthotospovirus, Soybean vein necrosis orthotospovirus, Tomato chlorotic spot orthotospovirus, Tomato spotted wilt orthotospovirus, Tomato yellow ring orthotospovirus, Tomato zonate spot orthotospovirus, Watermelon bud necrosis orthotospovirus, Watermelon silver mottle orthotospovirus, Zucchini lethal chlorosis orthotospovirus, Millipede wumivirus, Tilapia tilapinevirus, Influenza A virus, Influenza B virus, Influenza D virus, Influenza C virus, Salmon isavirus, Johnston Atoll quaranjavirus, Quaranfil quaranjavirus, Dhori thogotovirus, Thogoto thogotovirus, Allium cepa amalgavirus 1, Allium cepa amalgavirus 2, Blueberry latent virus, Rhododendron virus A, Southern tomato virus, Spinach amalgavirus 1, Vicia cryptic virus M, Zoostera marina amalgavirus 1, Zoostera marina amalgavirus 2, Zygosaccharomyces bailii virus Z, Cryphonectria hypovirus 1, Cryphonectria hypovirus 2, Cryphonectria hypovirus 3, Cryphonectria hypovirus 4, Beet cryptic virus 1, Carrot cryptic virus, Cherry chlorotic rusty spot associated partitivirus, Chondrostereum purpureum cryptic virus 1, Flammulina velutipes browning virus, Helicobasidium mompa partitivirus V70, Heterobasidion partitivirus 1, Heterobasidion partitivirus 3, Heterobasidion partitivirus 12, Heterobasidion partitivirus 13, Heterobasidion partitivirus 15, Rosellinia necatrix partitivirus 2, Vicia cryptic virus, White clover cryptic virus 1, Atkinsonella hypoxylon virus, Cannabis cryptic virus, Ceratocystis resinifera virus 1, Crimson clover cryptic virus 2, Dill cryptic virus 2, Fusarium poae virus 1, Heterobasidion partitivirus 2, Heterobasidion partitivirus 7, Heterobasidion partitivirus 8, Heterobasidion partitivirus P, Hop trefoil cryptic virus 2, Pleurotus ostreatus virus 1, Primula malacoides virus 1, Red clover cryptic virus 2, Rhizoctonia solani virus 717, Rosellinia necatrix virus 1, White clover cryptic virus 2, Cryptosporidium parvum virus 1, Beet cryptic virus 2, Beet cryptic virus 3, Fig cryptic virus, Pepper cryptic virus 1, Pepper cryptic virus 2, Aspergillus ochraceous virus, Discula destructiva virus 1, Discula destructiva virus 2, Fusarium solani virus 1, Gremmeniella abietina RNA virus MS1, Ophiostoma partitivirus 1, Penicillium stoloniferum virus F, Penicillium stoloniferum virus S, Agaricus bisporus virus 4, Alfalfa cryptic virus 1, Carnation cryptic virus 1, Carrot temperate virus 1, Carrot temperate virus 2, Carrot temperate virus 3, Carrot temperate virus 4, Gaeumannomyces graminis virus 0196A, Gaeumannomyces graminis virus T1A, Hop trefoil cryptic virus 1, Hop trefoil cryptic virus 3, Radish yellow edge virus, Ryegrass cryptic virus, Spinach temperate virus, White clover cryptic virus 3, Beihai picobirnavirus, Equine picobirnavirus, Human picobirnavirus, Aplysia abyssovirus 1, Muarterivirus afrigant, Alphaarterivirus equid, Lambdaarterivirus afriporav, Deltaarterivirus hemfev, Epsilonarterivirus hemcep, Epsilonarterivirus safriver, Epsilonarterivirus zamalb, Etaarterivirus ugarco 1, Iotaarterivirus debrazmo, Iotaarterivirus kibreg 1, Iotaarterivirus pejah, Thetaarterivirus kafuba, Thetaarterivirus mikelba 1, Zetaarterivirus ugarco 1, Betaarterivirus suid 2, Betaarterivirus chinrav 1, Betaarterivirus ninrav, Betaarterivirus sheoin, Betaarterivirus suid 1, Betaarterivirus timiclar, Gammaarterivirus lacdeh, Nuarterivirus guemel, Kappaarterivirus wobum, Chinturpovirus 1, Ptyasnivirus 1, Oligodon snake nidovirus 1, Microhyla letovirus 1, Bat coronavirus CDPHE15, Bat coronavirus HKU10, Rhinolophus ferrumequinum alphacoronavirus HuB-2013, Human coronavirus 229E, Lucheng Rn rat coronavirus, Mink coronavirus 1, Miniopterus bat coronavirus 1, Miniopterus bat coronavirus HKU8, Myotis ricketti alphacoronavirus Sax-2011, Nyctalus velutinus alphacoronavirus SC-2013, Pipistrellus kuhlii coronavirus 3398, Porcine epidemic diarrhea virus, Scotophilus bat coronavirus 512, Rhinolophus bat coronavirus HKU2, Human coronavirus NL63, NL63-related bat coronavirus strain BtKYNL63-9b, Sorex araneus coronavirus T14, Suncus murinus coronavirus X74, Alphacoronavirus 1, Betacoronavirus 1, China Rattus coronavirus HKU24, Human coronavirus HKU1, Murine coronavirus, Myodes coronavirus 2JL14, Bat Hp-betacoronavirus Zhejiang2013, Hedgehog coronavirus 1, Middle East respiratory syndrome-related coronavirus, Pipistrellus bat coronavirus HKU5, Tylonycteris bat coronavirus HKU4, Eidolon bat coronavirus C704, Rousettus bat coronavirus GCCDC1, Rousettus bat coronavirus HKU9, Severe acute respiratory syndrome-related coronavirus, Wigeon coronavirus HKU20, Bulbul coronavirus HKU11, Common moorhen coronavirus HKU21, Coronavirus HKU15, Munia coronavirus HKU13, White-eye coronavirus HKU16, Night heron coronavirus HKU19, Goose coronavirus CB17, Beluga whale coronavirus SW1, Avian coronavirus, Avian coronavirus 9203, Duck coronavirus 2714, Turrinivirus 1, Botrylloides leachii nidovirus, Alphamesonivirus 4, Alphamesonivirus 8, Alphamesonivirus 5, Alphamesonivirus 7, Alphamesonivirus 2, Alphamesonivirus 3, Alphamesonivirus 9, Alphamesonivirus 1, Alphamesonivirus 10, Alphamesonivirus 6, Planidovirus 1, Nangarvirus 1, Halfbeak nidovirus 1, Charybnivirus 1, Decronivirus 1, Paguronivirus 1, Gill-associated virus, Okavirus 1, Yellow head virus, White bream virus, Fathead minnow nidovirus 1, Chinook salmon nidovirus 1, Bovine nidovirus 1, Hebius tobanivirus 1, Infratovirus 1, Lycodon tobanivirus 1, Ball python nidovirus 1, Morelia tobanivirus 1, Berisnavirus 1, Shingleback nidovirus 1, Sectovirus 1, Bovine torovirus, Equine torovirus, Porcine torovirus, Bavaria virus, European brown hare syndrome virus, Rabbit hemorrhagic disease virus, Minovirus A, Nacovirus A, Newbury 1 virus, Norwalk virus, Recovirus A, Nordland virus, Sapporo virus, Saint Valerien virus, Feline calicivirus, Vesicular exanthema of swine virus, Acute bee paralysis virus, Israeli acute paralysis virus, Kashmir bee virus, Mud crab virus, Solenopsis invicta virus 1, Taura syndrome virus, Aphid lethal paralysis virus, Cricket paralysis virus, Drosophila C virus, Rhopalosiphum padi virus, Black queen cell virus, Himetobi P virus, Homalodisca coagulata virus 1, Plautia stali intestine virus, Triatoma virus, Antheraea pernyi iflavirus, Brevicoryne brassicae virus, Deformed wing virus, Dinocampus coccinellae paralysis virus, Ectropis obliqua virus, Infectious flacherie virus, Lygus lineolaris virus 1, Lymantria dispar iflavirus 1, Nilaparvata lugens honeydew virus 1, Perina nuda virus, Sacbrood virus, Slow bee paralysis virus, Spodoptera exigua iflavirus 1, Spodoptera exigua iflavirus 2, Varroa destructor virus 1, Chaetoceros socialis forma radians RNA virus 1, Chaetoceros tenuissimus RNA virus 01, Rhizosolenia setigera RNA virus 01, Astarnavirus, Aurantiochytrium single-stranded RNA virus 01, Jericarnavirus B, Sanfarnavirus 1, Sanfarnavirus 2, Sanfarnavirus 3, Heterosigma akashiwo RNA virus, Britarnavirus 1, Britarnavirus 4, Palmarnavirus 128, Palmarnavirus 473, Britarnavirus 2, Britarnavirus 3, Chaetarnavirus 2, Chaetenuissarnavirus II, Jericarnavirus A, Palmarnavirus 156, Aalivirus A, Ailurivirus A, Ampivirus A, Anativirus A, Anativirus B, Bovine rhinitis A virus, Bovine rhinitis B virus, Equine rhinitis A virus, Foot-and-mouth disease virus, Aquamavirus A, Avihepatovirus A, Avisivirus A, Avisivirus B, Avisivirus C, Boosepivirus A, Boosepivirus B, Boosepivirus C, Bopivirus A, Cardiovirus A, Cardiovirus B, Cardiovirus C, Cardiovirus D, Cardiovirus E, Cardiovirus F, Cosavirus A, Cosavirus B, Cosavirus D, Cosavirus E, Cosavirus F, Crahelivirus A, Crohivirus A, Crohivirus B, Cadicivirus A, Cadicivirus B, Diresapivirus A, Diresapivirus B, Enterovirus A, Enterovirus B, Enterovirus C, Enterovirus D, Enterovirus E, Enterovirus F, Enterovirus G, Enterovirus H, Enterovirus I, Enterovirus J, Enterovirus K, Enterovirus L, Rhinovirus A, Rhinovirus B, Rhinovirus C, Erbovirus A, Felipivirus A, Fipivirus A, Fipivirus B, Fipivirus C, Fipivirus D, Fipivirus E, Gallivirus A, Gruhelivirus A, Grusopivirus A, Grusopivirus B, Harkavirus A, Hemipivirus A, Hepatovirus A, Hepatovirus B, Hepatovirus C, Hepatovirus D, Hepatovirus E, Hepatovirus F, Hepatovirus G, Hepatovirus H, Hepatovirus I, Hunnivirus A, Aichivirus A, Aichivirus B, Aichivirus C, Aichivirus D, Aichivirus E, Aichivirus F, Kunsagivirus A, Kunsagivirus B, Kunsagivirus C, Limnipivirus A, Limnipivirus B, Limnipivirus C, Livupivirus A, Ludopivirus A, Malagasivirus A, Malagasivirus B, Megrivirus A, Megrivirus B, Megrivirus C, Megrivirus D, Megrivirus E, Mischivirus A, Mischivirus B, Mischivirus C, Mischivirus D, Mosavirus A, Mosavirus B, Mupivirus A, Myrropivirus A, Orivirus A, Oscivirus A, Parabovirus A, Parabovirus B, Parabovirus C, Parechovirus A, Parechovirus B, Parechovirus C, Parechovirus D, Parechovirus E, Parechovirus F, Pasivirus A, Passerivirus A, Passerivirus B, Pemapivirus A, Poecivirus A, Potamipivirus A, Potamipivirus B, Rabovirus A, Rabovirus B, Rabovirus C, Rabovirus D, Rafivirus A, Rafivirus B, Rafivirus C, Rohelivirus A, Rosavirus A, Rosavirus B, Rosavirus C, Sakobuvirus A, Salivirus A, Sapelovirus A, Sapelovirus B, Senecavirus A, Shanbavirus A, Sicinivirus A, Symapivirus A, Teschovirus A, Teschovirus B, Torchivirus A, Tottorivirus A, Tremovirus A, Tremovirus B, Tropivirus A, Chironomus riparius virus 1, Hubei chipolycivirus, Hubei hupolycivirus, Formica exsecta virus 3, Lasius neglectus virus 1, Lasius neglectus virus 2, Lasius niger virus 1, Linepithema humile virus 2, Monomorium pharaonis virus 1, Monomorium pharaonis virus 2, Myrmica scabrinodis virus 1, Shuangao insect virus 8, Solenopsis invicta virus 2, Solenopsis invicta virus 4, Andean potato mottle virus, Bean pod mottle virus, Bean rugose mosaic virus, Broad bean stain virus, Broad bean true mosaic virus, Cowpea mosaic virus, Cowpea severe mosaic virus, Glycine mosaic virus, Pea green mottle virus, Pea mild mosaic virus, Quail pea mosaic virus, Radish mosaic virus, Red clover mottle virus, Squash mosaic virus, Ullucus virus C, Broad bean wilt virus 1, Broad bean wilt virus 2, Cucurbit mild mosaic virus, Gentian mosaic virus, Grapevine fabavirus, Lamium mild mosaic virus, Prunus virus F, Aeonium ringspot virus, Apricot latent ringspot virus, Arabis mosaic virus, Arracacha virus A, Artichoke Aegean ringspot virus, Artichoke Italian latent virus, Artichoke yellow ringspot virus, Beet ringspot virus, Blackcurrant reversion virus, Blueberry latent spherical virus, Blueberry leaf mottle virus, Cassava American latent virus, Cassava green mottle virus, Cherry leaf roll virus, Chicory yellow mottle virus, Cocoa necrosis virus, Crimson clover latent virus, Cycas necrotic stunt virus, Grapevine Anatolian ringspot virus, Grapevine Bulgarian latent virus, Grapevine chrome mosaic virus, Grapevine deformation virus, Grapevine fanleaf virus, Grapevine Tunisian ringspot virus, Hibiscus latent ringspot virus, Lucerne Australian latent virus, Melon mild mottle virus, Mulberry mosaic leaf roll associated virus, Mulberry ringspot virus, Myrobalan latent ringspot virus, Olive latent ringspot virus, Peach rosette mosaic virus, Potato black ringspot virus, Potato virus B, Potato virus U, Raspberry ringspot virus, Soybean latent spherical virus, Tobacco ringspot virus, Tomato black ring virus, Tomato ringspot virus, Apple latent spherical virus, Arracacha virus B, Cherry rasp leaf virus, Currant latent virus, Stocky prune virus, Chocolate lily virus A, Dioscorea mosaic associated virus, Satsuma dwarf virus, Black raspberry necrosis virus, Strawberry mottle virus, Carrot necrotic dieback virus, Dandelion yellow mosaic virus, Parsnip yellow fleck virus, Carrot torradovirus 1, Lettuce necrotic leaf curl virus, Motherwort yellow mottle virus, Squash chlorotic leaf spot virus, Tomato marchitez virus, Tomato torrado virus, Anthriscus yellows virus, Bellflower vein chlorosis virus, Maize chlorotic dwarf virus, Rice tungro spherical virus, Strawberry latent ringspot virus, Solenopsis invicta virus 3, Nylanderia fulva virus 1, Heterocapsa circularisquama RNA virus 01, Mushroom bacilliform virus, Poinsettia latent virus, Artemisia virus A, Blueberry shoestring virus, Cocksfoot mottle virus, Cymbidium chlorotic mosaic virus, Imperata yellow mottle virus, Lucerne transient streak virus, Papaya lethal yellowing virus, Rice yellow mottle virus, Rottboellia yellow mottle virus, Ryegrass mottle virus, Sesbania mosaic virus, Solanum nodiflorum mottle virus, Southern bean mosaic virus, Southern cowpea mosaic virus, Sowbane mosaic virus, Soybean yellow common mosaic virus, Subterranean clover mottle virus, Turnip rosette virus, Velvet tobacco mottle virus, Areca palm necrotic ringspot virus, Areca palm necrotic spindle-spot virus, Bellflower veinal mottle virus, Blackberry virus Y, Barley mild mosaic virus, Barley yellow mosaic virus, Oat mosaic virus, Rice necrosis mosaic virus, Wheat spindle streak mosaic virus, Wheat yellow mosaic virus, Celery latent virus, Cassava brown streak virus, Coccinia mottle virus, Cucumber vein yellowing virus, Squash vein yellowing virus, Sweet potato mild mottle virus, Tomato mild mottle virus, Ugandan cassava brown streak virus, Alpinia mosaic virus, Alpinia oxyphylla mosaic virus, Artichoke latent virus, Broad-leafed dock virus A, Cardamom mosaic virus, Chinese yam necrotic mosaic virus, Maclura mosaic virus, Narcissus latent virus, Yam chlorotic mosaic virus, Yam chlorotic necrosis virus, Caladenia virus A, Sugarcane streak mosaic virus, Triticum mosaic virus, African eggplant mosaic virus, Algerian watermelon mosaic virus, Alstroemeria mosaic virus, Alternanthera mild mosaic virus, Amaranthus leaf mottle virus, Amazon lily mosaic virus, Angelica virus Y, Apium virus Y, Araujia mosaic virus, Arracacha mottle virus, Asparagus virus 1, Banana bract mosaic virus, Barbacena virus Y, Basella rugose mosaic virus, Bean common mosaic necrosis virus, Bean common mosaic virus, Bean yellow mosaic virus, Beet mosaic virus, Bidens mosaic virus, Bidens mottle virus, Blue squill virus A, Brugmansia mosaic virus, Brugmansia suaveolens mottle virus, Butterfly flower mosaic virus, Calanthe mild mosaic virus, Calla lily latent virus, Callistephus mottle virus, Canna yellow streak virus, Carnation vein mottle virus, Carrot thin leaf virus, Carrot virus Y, Catharanthus mosaic virus, Celery mosaic virus, Ceratobium mosaic virus, Chilli ringspot virus, Chilli veinal mottle virus, Chinese artichoke mosaic virus, Clitoria virus Y, Clover yellow vein virus, Cocksfoot streak virus, Colombian datura virus, Commelina mosaic virus, Cowpea aphid-borne mosaic virus, Cucurbit vein banding virus, Cypripedium virus Y, Cyrtanthus elatus virus A, Daphne mosaic virus, Daphne virus Y, Dasheen mosaic virus, Datura shoestring virus, Dendrobium chlorotic mosaic virus, Dioscorea mosaic virus, Diuris virus Y, Donkey orchid virus A, East Asian Passiflora distortion virus, East Asian Passiflora virus, Endive necrotic mosaic virus, Euphorbia ringspot virus, Freesia mosaic virus, Fritillary virus Y, Gloriosa stripe mosaic virus, Gomphocarpus mosaic virus, Habenaria mosaic virus, Hardenbergia mosaic virus, Henbane mosaic virus, Hibbertia virus Y, Hippeastrum mosaic virus, Hyacinth mosaic virus, Impatiens flower break virus, Iris fulva mosaic virus, Iris mild mosaic virus, Iris severe mosaic virus, Japanese yam mosaic virus, Jasmine virus T, Johnsongrass mosaic virus, Kalanchoe mosaic virus, Keunjorong mosaic virus, Konjac mosaic virus, Leek yellow stripe virus, Lettuce Italian necrotic virus, Lettuce mosaic virus, Lily mottle virus, Lily virus Y, Lupinus mosaic virus, Lycoris mild mottle virus, Maize dwarf mosaic virus, Malva vein clearing virus, Mashua virus Y, Meadow saffron breaking virus, Mediterranean ruda virus, Moroccan watermelon mosaic virus, Narcissus degeneration virus, Narcissus late season yellows virus, Narcissus yellow stripe virus, Nerine yellow stripe virus, Nothoscordum mosaic virus, Onion yellow dwarf virus, Ornithogalum mosaic virus, Ornithogalum virus 2, Ornithogalum virus 3, Panax virus Y, Papaya leaf distortion mosaic virus, Papaya ringspot virus, Paris mosaic necrosis virus, Parsnip mosaic virus, Passiflora chlorosis virus, Passion fruit woodiness virus, Pea seed-borne mosaic virus, Peanut mottle virus, Pecan mosaic-associated virus, Pennisetum mosaic virus, Pepper mottle virus, Pepper severe mosaic virus, Pepper veinal mottle virus, Pepper yellow mosaic virus, Peru tomato mosaic virus, Pfaffia mosaic virus, Platycodon mild mottle virus, Pleione virus Y, Plum pox virus, Pokeweed mosaic virus, Potato virus A, Potato virus V, Potato virus Y, Potato yellow blotch virus, Ranunculus leaf distortion virus, Ranunculus mild mosaic virus, Ranunculus mosaic virus, Rhopalanthe virus Y, Saffron latent virus, Sarcochilus virus Y, Scallion mosaic virus, Shallot yellow stripe virus, Sorghum mosaic virus, Soybean mosaic virus, Spiranthes mosaic virus 3, Sudan watermelon mosaic virus, Sugarcane mosaic virus, Sunflower chlorotic mottle virus, Sunflower mild mosaic virus, Sunflower mosaic virus, Sunflower ring blotch virus, Sweet potato feathery mottle virus, Sweet potato latent virus, Sweet potato mild speckling virus, Sweet potato virus 2, Sweet potato virus C, Sweet potato virus G, Tamarillo leaf malformation virus, Telfairia mosaic virus, Telosma mosaic virus, Thunberg fritillary mosaic virus, Tobacco etch virus, Tobacco mosqueado virus, Tobacco vein banding mosaic virus, Tobacco vein mottling virus, Tomato necrotic stunt virus, Tradescantia mild mosaic virus, Tuberose mild mosaic virus, Tuberose mild mottle virus, Tulip breaking virus, Tulip mosaic virus, Turnip mosaic virus, Twisted-stalk chlorotic streak virus, Vallota mosaic virus, Vanilla distortion mosaic virus, Verbena virus Y, Watermelon leaf mottle virus, Watermelon mosaic virus, Wild melon banding virus, Wild onion symptomless virus, Wild potato mosaic virus, Wild tomato mosaic virus, Wisteria vein mosaic virus, Yam mild mosaic virus, Yam mosaic virus, Yambean mosaic virus, Zantedeschia mild mosaic virus, Zea mosaic virus, Zucchini shoestring virus, Zucchini tigre mosaic virus, Zucchini yellow fleck virus, Zucchini yellow mosaic virus, Passiflora edulis symptomless virus, Rose yellow mosaic virus, Agropyron mosaic virus, Hordeum mosaic virus, Ryegrass mosaic virus, Brome streak mosaic virus, Oat necrotic mottle virus, Tall oatgrass mosaic virus, Wheat eqlid mosaic virus, Wheat streak mosaic virus, Yellow oat grass mosaic virus, Common reed chlorotic stripe virus, Longan witches broom-associated virus, Spartina mottle virus, Avastrovirus 1, Avastrovirus 2, Avastrovirus 3, Mamastrovirus 1, Mamastrovirus 2, Mamastrovirus 3, Mamastrovirus 4, Mamastrovirus 5, Mamastrovirus 6, Mamastrovirus 7, Mamastrovirus 8, Mamastrovirus 9, Mamastrovirus 10, Mamastrovirus 11, Mamastrovirus 12, Mamastrovirus 13, Mamastrovirus 14, Mamastrovirus 15, Mamastrovirus 16, Mamastrovirus 17, Mamastrovirus 18, Mamastrovirus 19, Infectious pancreatic necrosis virus, Tellina virus, Yellowtail ascites virus, Infectious bursal disease virus, Blotched snakehead virus, Lates calcarifer birnavirus, Drosophina B birnavirus, Drosophila X virus, Mosquito X virus, Rotifer birnavirus, Tellina virus 1, Euprosterna elaeasa virus, Thosea asigna virus, Botrytis porri botybirnavirus 1, Duck hepatitis B virus, Heron hepatitis B virus, Parrot hepatitis B virus, Tibetan frog hepatitis B virus, Blue gill hepatitis B virus, Capuchin monkey hepatitis B virus, Chinese shrew hepatitis B virus, Domestic cat hepatitis B virus, Ground squirrel hepatitis virus, Hepatitis B virus, Long-fingered bat hepatitis B virus, Pomona bat hepatitis B virus, Roundleaf bat hepatitis B virus, Tai Forest hepatitis B virus, Tent-making bat hepatitis B virus, Woodchuck hepatitis virus, Woolly monkey hepatitis B virus, White sucker hepatitis B virus, Anopheles gambiae Moose virus, Antheraea semotivirus Tamy, Ascaris lumbricoides Tas virus, Bombyx mori Pao virus, Caenorhabditis elegans Cer13 virus, Drosophila melanogaster Bel virus, Drosophila melanogaster Roo virus, Drosophila semotivirus Max, Drosophila simulans Ninja virus, Schistosoma semotivirus Sinbad, Takifugu rubripes Suzu virus, Aglaonema bacilliform virus, Banana streak GF virus, Banana streak IM virus, Banana streak MY virus, Banana streak OL virus, Banana streak UA virus, Banana streak UT virus, Banana streak UL virus, Banana streak UM virus, Banana streak VN virus, Birch leaf roll-associated virus, Blackberry virus F, Bougainvillea chlorotic vein banding virus, Cacao bacilliform Sri Lanka virus, Cacao mild mosaic virus, Cacao swollen shoot CD virus, Cacao swollen shoot CE virus, Cacao swollen shoot Ghana M virus, Cacao swollen shoot Ghana N virus, Cacao swollen shoot Ghana Q virus, Cacao swollen shoot Togo A virus, Cacao swollen shoot Togo B virus, Cacao yellow vein banding virus, Canna yellow mottle associated virus, Canna yellow mottle virus, Citrus yellow mosaic virus, Codonopsis vein clearing virus, Commelina yellow mottle virus, Dioscorea bacilliform AL virus, Dioscorea bacilliform AL virus 2, Dioscorea bacilliform ES virus, Dioscorea bacilliform RT virus 1, Dioscorea bacilliform RT virus 2, Dioscorea bacilliform SN virus, Dioscorea bacilliform TR virus, Fig badnavirus 1, Gooseberry vein banding associated virus, Grapevine badnavirus 1, Grapevine Roditis leaf discoloration-associated virus, Grapevine vein clearing virus, Jujube mosaic-associated virus, Kalanchoe top-spotting virus, Mulberry badnavirus 1, Pagoda yellow mosaic associated virus, Pineapple bacilliform CO virus, Pineapple bacilliform ER virus, Piper yellow mottle virus, Rubus yellow net virus, Schefflera ringspot virus, Spiraea yellow leafspot virus, Sugarcane bacilliform Guadeloupe A virus, Sugarcane bacilliform Guadeloupe D virus, Sugarcane bacilliform IM virus, Sugarcane bacilliform MO virus, Sweet potato pakakuy virus, Taro bacilliform CH virus, Taro bacilliform virus, Wisteria badnavirus 1, Yacon necrotic mottle virus, Angelica bushy stunt virus, Atractylodes mild mottle virus, Carnation etched ring virus, Cauliflower mosaic virus, Dahlia mosaic virus, Figwort mosaic virus, Horseradish latent virus, Lamium leaf distortion virus, Mirabilis mosaic virus, Rudbeckia flower distortion virus, Soybean Putnam virus, Strawberry vein banding virus, Thistle mottle virus, Cassava vein mosaic virus, Sweet potato collusive virus, Dioscorea nummularia associated virus, Petunia vein clearing virus, Rose yellow vein virus, Sweet potato vein clearing virus, Tobacco vein clearing virus, Blueberry red ringspot virus, Cestrum yellow leaf curling virus, Peanut chlorotic streak virus, Soybean chlorotic mottle virus, Rice tungro bacilliform virus, Blueberry fruit drop associated virus, Ceratitis capitata Yoyo virus, Drosophila ananassae Tom virus, Drosophila melanogaster 17-6 virus, Drosophila melanogaster 297 virus, Drosophila melanogaster Gypsy virus, Drosophila melanogaster Idefix virus, Drosophila melanogaster Tirant virus, Drosophila melanogaster Zam virus, Drosophila virilis Tv1 virus, Trichoplusia ni TED virus, Arabidopsis thaliana Athila virus, Arabidopsis thaliana Tat4 virus, Bombyx mori Mag virus, Caenorhabditis elegans Cer1 virus, Cladosporium fulvum T-1 virus, Dictyostelium discoideum Skipper virus, Drosophila buzzatii Osvaldo virus, Drosophila melanogaster 412 virus, Drosophila melanogaster Blastopia virus, Drosophila melanogaster Mdg1 virus, Drosophila melanogaster Mdg3 virus, Drosophila melanogaster Micropia virus, Drosophila virilis Ulysses virus, Fusarium oxysporum Skippy virus, Lilium henryi Del1 virus, Saccharomyces cerevisiae Ty3 virus, Schizosaccharomyces pombe Tf1 virus, Schizosaccharomyces pombe Tf2 virus, Takifugu rubripes Sushi virus, Tribolium castaneum Woot virus, Tripneustis gratilla SURL virus, Aedes aegypti Mosqcopia virus, Candida albicans Tca2 virus, Candida albicans Tca5 virus, Drosophila melanogaster 1731 virus, Drosophila melanogaster copia virus, Saccharomyces cerevisiae Ty5 virus, Volvox carteri Lueckenbuesser virus, Volvox carteri Osser virus, Arabidopsis thaliana Art1 virus, Arabidopsis thaliana AtRE1 virus, Arabidopsis thaliana evelknievel virus, Arabidopsis thaliana Tal virus, Brassica oleracea Melmoth virus, Cajanus cajan Panzee virus, Glycine max Tgmr virus, Hordeum vulgare BARE-1 virus, Nicotiana tabacum Tnt1 virus, Nicotiana tabacum Tto1 virus, Oryza australiensis RIRE1 virus, Oryza longistaminata Retrofit virus, Physarum polycephalum Tp1 virus, Saccharomyces cerevisiae Ty1 virus, Saccharomyces cerevisiae Ty2 virus, Saccharomyces cerevisiae Ty4 virus, Solanum tuberosum Tst1 virus, Triticum aestivum WIS2 virus, Zea mays Hopscotch virus, Zea mays Sto4 virus, Arabidopsis thaliana Endovir virus, Glycine max SIRE1 virus, Lycopersicon esculentum ToRTL1 virus, Zea mays Opie2 virus, Zea mays Prem2 virus, Phaseolus vulgaris Tpv2-6 virus, Avian carcinoma Mill Hill virus 2, Avian leukosis virus, Avian myeloblastosis virus, Avian myelocytomatosis virus 29, Avian sarcoma virus CT10, Fujinami sarcoma virus, Rous sarcoma virus, UR2 sarcoma virus, Y73 sarcoma virus, Jaagsiekte sheep retrovirus, Langur virus, Mason-Pfizer monkey virus, Mouse mammary tumor virus, Squirrel monkey retrovirus, Bovine leukemia virus, Primate T-lymphotropic virus 1, Primate T-lymphotropic virus 2, Primate T-lymphotropic virus 3, Walleye dermal sarcoma virus, Walleye epidermal hyperplasia virus 1, Walleye epidermal hyperplasia virus 2, Chick syncytial virus, Feline leukemia virus, Finkel-Biskis-Jinkins murine sarcoma virus, Gardner-Arnstein feline sarcoma virus, Gibbon ape leukemia virus, Guinea pig type-C oncovirus, Hardy-Zuckerman feline sarcoma virus, Harvey murine sarcoma virus, Kirsten murine sarcoma virus, Koala retrovirus, Moloney murine sarcoma virus, Murine leukemia virus, Porcine type-C oncovirus, Reticuloendotheliosis virus, Snyder-Theilen feline sarcoma virus, Trager duck spleen necrosis virus, Viper retrovirus, Woolly monkey sarcoma virus, Bovine immunodeficiency virus, Caprine arthritis encephalitis virus, Equine infectious anemia virus, Feline immunodeficiency virus, Human immunodeficiency virus 1, Human immunodeficiency virus 2, Jembrana disease virus, Puma lentivirus, Simian immunodeficiency virus, Visna-maedi virus, Bovine foamy virus, Equine foamy virus, Feline foamy virus, Brown greater galago prosimian foamy virus, Bornean orangutan simian foamy virus, Central chimpanzee simian foamy virus, Cynomolgus macaque simian foamy virus, Eastern chimpanzee simian foamy virus, Grivet simian foamy virus, Guenon simian foamy virus, Japanese macaque simian foamy virus, Rhesus macaque simian foamy virus, Spider monkey simian foamy virus, Squirrel monkey simian foamy virus, Taiwanese macaque simian foamy virus, Western chimpanzee simian foamy virus, Western lowland gorilla simian foamy virus, White-tufted-ear marmoset simian foamy virus, Yellow-breasted capuchin simian foamy virus, Aspergillus fumigatus polymycovirus 1, Aspergillus spelaeus polymycovirus 1, Beauveria bassiana polymycovirus 1, Botryoshaeria dothidea polymycovirus 1, Cladosporium cladosporioides polymycovirus 1, Colletotrichum camelliae polymycovirus 1, Fusarium redolens polymycovirus 1, Magnaporthe oryzae polymycovirus 1, Penicillium digitatum polymycovirus 1, Penicillum brevicompactum polymycovirus 1, Macrobrachium satellite virus 1, Tobacco albetovirus 1, Tobacco albetovirus 2, Tobacco albetovirus 3, Maize aumaivirus 1, Panicum papanivirus 1, Tobacco virtovirus 1, Acanthocystis turfacea chlorella virus 1, Hydra viridis Chlorella virus 1, Paramecium bursaria Chlorella virus 1, Paramecium bursaria Chlorella virus A1, Paramecium bursaria Chlorella virus AL1A, Paramecium bursaria Chlorella virus AL2A, Paramecium bursaria Chlorella virus BJ2C, Paramecium bursaria Chlorella virus CA4A, Paramecium bursaria Chlorella virus CA4B, Paramecium bursaria Chlorella virus IL3A, Paramecium bursaria Chlorella virus NC1A, Paramecium bursaria Chlorella virus NE8A, Paramecium bursaria Chlorella virus NY2A, Paramecium bursaria Chlorella virus NYs1, Paramecium bursaria Chlorella virus SC1A, Paramecium bursaria Chlorella virus XY6E, Paramecium bursaria Chlorella virus XZ3A, Paramecium bursaria Chlorella virus XZ4A, Paramecium bursaria Chlorella virus XZ4C, Emiliania huxleyi virus 86, Ectocarpus fasciculatus virus a, Ectocarpus siliculosus virus 1, Ectocarpus siliculosus virus a, Feldmannia irregularis virus a, Feldmannia species virus, Feldmannia species virus a, Hincksia hinckiae virus a, Myriotrichia clavaeformis virus a, Pilayella littoralis virus 1, Micromonas pusilla virus SP1, Ostreococcus tauri virus OtV5, Chrysochromulina brevifilum virus PW1, Heterosigma akashiwo virus 01, Cafeteria roenbergensis virus, Acanthamoeba polyphaga mimivirus, Heliothis virescens ascovirus 3a, Spodoptera frugiperda ascovirus 1a, Trichoplusia ni ascovirus 2a, Diadromus pulchellus toursvirus, Lymphocystis disease virus 1, Lymphocystis disease virus 2, Lymphocystis disease virus 3, Infectious spleen and kidney necrosis virus, Scale drop disease virus, Ambystoma tigrinum virus, Common midwife toad virus, Epizootic haematopoietic necrosis virus, Frog virus 3, Santee-Cooper ranavirus, Singapore grouper iridovirus, Anopheles minimus iridovirus, Invertebrate iridescent virus 3, Invertebrate iridescent virus 9, Invertebrate iridescent virus 22, Invertebrate iridescent virus 25, Decapod iridescent virus 1, Invertebrate iridescent virus 6, Invertebrate iridescent virus 31, Marseillevirus marseillevirus, Senegalvirus marseillevirus, Lausannevirus, Tunisvirus, African swine fever virus, Canarypox virus, Flamingopox virus, Fowlpox virus, Juncopox virus, Mynahpox virus, Penguinpox virus, Pigeonpox virus, Psittacinepox virus, Quailpox virus, Sparrowpox virus, Starlingpox virus, Turkeypox virus, Goatpox virus, Lumpy skin disease virus, Sheeppox virus, Murmansk microtuspox virus, Yokapox virus, Mule deerpox virus, Nile crocodilepox virus, Hare fibroma virus, Myxoma virus, Rabbit fibroma virus, Squirrel fibroma virus, Eastern kangaroopox virus, Western kangaroopox virus, Molluscum contagiosum virus, Sea otterpox virus, Abatino macacapox virus, Akhmeta virus, Camelpox virus, Cowpox virus, Ectromelia virus, Monkeypox virus, Raccoonpox virus, Skunkpox virus, Taterapox virus, Vaccinia virus, Variola virus, Volepox virus, Cotia virus, Bovine papular stomatitis virus, Grey sealpox virus, Orf virus, Pseudocowpox virus, Red deerpox virus, Pteropox virus, Salmon gillpox virus, Squirrelpox virus, Swinepox virus, Eptesipox virus, Tanapox virus, Yaba monkey tumor virus, Anomala cuprea entomopoxvirus, Aphodius tasmaniae entomopoxvirus, Demodema bonariensis entomopoxvirus, Dermolepida albohirtum entomopoxvirus, Figulus sublaevis entomopoxvirus, Geotrupes sylvaticus entomopoxvirus, Melolontha melolontha entomopoxvirus, Acrobasis zelleri entomopoxvirus, Adoxophyes honmai entomopoxvirus, Amsacta moorei entomopoxvirus, Arphia conspersa entomopoxvirus, Choristoneura biennis entomopoxvirus, Choristoneura conflicta entomopoxvirus, Choristoneura diversuma entomopoxvirus, Choristoneura fumiferana entomopoxvirus, Choristoneura rosaceana entomopoxvirus, Chorizagrotis auxiliaris entomopoxvirus, Heliothis armigera entomopoxvirus, Locusta migratoria entomopoxvirus, Mythimna separata entomopoxvirus, Oedaleus senegalensis entomopoxvirus, Operophtera brumata entomopoxvirus, Schistocerca gregaria entomopoxvirus, Melanoplus sanguinipes entomopoxvirus, Aedes aegypti entomopoxvirus, Camptochironomus tentans entomopoxvirus, Chironomus attenuatus entomopoxvirus, Chironomus luridus entomopoxvirus, Chironomus plumosus entomopoxvirus, Goeldichironomus holoprasinus entomopoxvirus, Diachasmimorpha entomopoxvirus, Cafeteriavirus-dependent mavirus, Mimivirus-dependent virus Sputnik, Mimivirus-dependent virus Zamilon, Sulfolobus turreted icosahedral virus 1, Sulfolobus turreted icosahedral virus 2, Pseudomonas virus PR4, Pseudomonas virus PRD1, Bacillus virus AP50, Bacillus virus Bam35, Bacillus virus GIL16, Bacillus virus Wipl, Gluconobacter virus GC1, Bovine atadenovirus D, Deer atadenovirus A, Duck atadenovirus A, Lizard atadenovirus A, Ovine atadenovirus D, Possum atadenovirus A, Psittacine atadenovirus A, Snake atadenovirus A, Duck aviadenovirus B, Falcon aviadenovirus A, Fowl aviadenovirus A, Fowl aviadenovirus B, Fowl aviadenovirus C, Fowl aviadenovirus D, Fowl aviadenovirus E, Goose aviadenovirus A, Pigeon aviadenovirus A, Pigeon aviadenovirus B, Psittacine aviadenovirus B, Psittacine aviadenovirus C, Turkey aviadenovirus B, Turkey aviadenovirus C, Turkey aviadenovirus D, Sturgeon ichtadenovirus A, Bat mastadenovirus A, Bat mastadenovirus B, Bat mastadenovirus C, Bat mastadenovirus D, Bat mastadenovirus E, Bat mastadenovirus F, Bat mastadenovirus G, Bat mastadenovirus H, Bat mastadenovirus I, Bat mastadenovirus J, Bovine mastadenovirus A, Bovine mastadenovirus B, Bovine mastadenovirus C, Canine mastadenovirus A, Deer mastadenovirus B, Dolphin mastadenovirus A, Dolphin mastadenovirus B, Equine mastadenovirus A, Equine mastadenovirus B, Human mastadenovirus A, Human mastadenovirus B, Human mastadenovirus C, Human mastadenovirus D, Human mastadenovirus E, Human mastadenovirus F, Human mastadenovirus G, Murine mastadenovirus A, Murine mastadenovirus B, Murine mastadenovirus C, Ovine mastadenovirus A, Ovine mastadenovirus B, Ovine mastadenovirus C, Platyrrhini mastadenovirus A, Polar bear mastadenovirus A, Porcine mastadenovirus A, Porcine mastadenovirus B, Porcine mastadenovirus C, Sea lion mastadenovirus A, Simian mastadenovirus A, Simian mastadenovirus B, Simian mastadenovirus C, Simian mastadenovirus D, Simian mastadenovirus E, Simian mastadenovirus F, Simian mastadenovirus G, Simian mastadenovirus H, Simian mastadenovirus I, Skunk mastadenovirus A, Squirrel mastadenovirus A, Tree shrew mastadenovirus A, Frog siadenovirus A, Great tit siadenovirus A, Penguin siadenovirus A, Raptor siadenovirus A, Skua siadenovirus A, Turkey siadenovirus A, Pseudoalteromonas virus Cr39582, Pseudoalteromonas virus PM2, Haloarcula hispanica icosahedral virus 2, Haloarcula hispanica virus PH1, Haloarcula hispanica virus SH1, Haloarcula virus HCIV1, Natrinema virus SNJ1, Thermus virus IN93, Thermus virus P23-77, Alphalipothrixvirus SBFV2, Alphalipothrixvirus SFV1, Acidianus filamentous virus 3, Acidianus filamentous virus 6, Acidianus filamentous virus 7, Acidianus filamentous virus 8, Acidianus filamentous virus 9, Sulfolobus islandicus filamentous virus, Acidianus filamentous virus 2, Deltalipothrixvirus SBFV3, Acidianus filamentous virus 1, Acidianus rod-shaped virus 1, Sulfolobus islandicus rod-shaped virus 1, Sulfolobus islandicus rod-shaped virus 2, Ageratum yellow vein Singapore alphasatellite, Cotton leaf curl Saudi Arabia alphasatellite, Ash gourd yellow vein mosaic alphasatellite, Capsicum India alphasatellite, Cleome leaf crumple alphasatellite, Croton yellow vein mosaic alphasatellite, Euphorbia yellow mosaic alphasatellite, Melon chlorotic mosaic alphasatellite, Sida Cuba alphasatellite, Tomato leaf curl New Delhi alphasatellite, Tomato leaf curl Virudhunagar alphasatellite, Tomato yellow spot alphasatellite, Whitefly associated Guatemala alphasatellite 2, Whitefly associated Puerto Rico alphasatellite 1, Ageratum enation alphasatellite, Ageratum yellow vein alphasatellite, Ageratum yellow vein China alphasatellite, Ageratum yellow vein India alphasatellite, Bhendi yellow vein alphasatellite, Cassava mosaic Madagascar alphasatellite, Chilli leaf curl alphasatellite, Cotton leaf curl Egypt alphasatellite, Cotton leaf curl Gezira alphasatellite, Cotton leaf curl Lucknow alphasatellite, Cotton leaf curl Multan alphasatellite, Gossypium darwinii symptomless alphasatellite, Malvastrum yellow mosaic alphasatellite, Malvastrum yellow mosaic Cameroon alphasatellite, Pedilanthus leaf curl alphasatellite, Sida leaf curl alphasatellite, Sida yellow vein Vietnam alphasatellite, Sunflower leaf curl Karnataka alphasatellite, Synedrella leaf curl alphasatellite, Tobacco curly shoot alphasatellite, Tomato leaf curl Buea alphasatellite, Tomato leaf curl Cameroon alphasatellite, Tomato leaf curl Pakistan alphasatellite, Tomato yellow leaf curl China alphasatellite, Tomato yellow leaf curl Thailand alphasatellite, Tomato yellow leaf curl Yunnan alphasatellite, Eclipta yellow vein alphasatellite, Gossypium mustelinum symptomless alphasatellite, Hollyhock yellow vein alphasatellite, Mesta yellow vein mosaic alphasatellite, Okra enation leaf curl alphasatellite, Okra yellow crinkle Cameroon alphasatellite, Vernonia yellow vein Fujian alphasatellite, Dragonfly associated alphasatellite, Whitefly associated Guatemala alphasatellite 1, Banana bunchy top alphasatellite 1, Banana bunchy top alphasatellite 2, Banana bunchy top alphasatellite 3, Cardamom bushy dwarf alphasatellite, Milk vetch dwarf alphasatellite 2, Pea necrotic yellow dwarf alphasatellite 2, Sophora yellow stunt alphasatellite 4, Sophora yellow stunt alphasatellite 5, Subterranean clover stunt alphasatellite 2, Faba bean necrotic yellows alphasatellite 2, Milk vetch dwarf alphasatellite 3, Faba bean necrotic stunt alphasatellite, Milk vetch dwarf alphasatellite 1, Pea necrotic yellow dwarf alphasatellite 1, Sophora yellow stunt alphasatellite 2, Cow vetch latent alphasatellite, Sophora yellow stunt alphasatellite 3, Faba bean necrotic yellows alphasatellite 1, Faba bean necrotic yellows alphasatellite 3, Sophora yellow stunt alphasatellite 1, Subterranean clover stunt alphasatellite 1, Coconut foliar decay alphasatellite, Acidianus bottle-shaped virus, Torque teno virus 1, Torque teno virus 2, Torque teno virus 3, Torque teno virus 4, Torque teno virus 5, Torque teno virus 6, Torque teno virus 7, Torque teno virus 8, Torque teno virus 9, Torque teno virus 10, Torque teno virus 11, Torque teno virus 12, Torque teno virus 13, Torque teno virus 14, Torque teno virus 15, Torque teno virus 16, Torque teno virus 17, Torque teno virus 18, Torque teno virus 19, Torque teno virus 20, Torque teno virus 21, Torque teno virus 22, Torque teno virus 23, Torque teno virus 24, Torque teno virus 25, Torque teno virus 26, Torque teno virus 27, Torque teno virus 28, Torque teno virus 29, Torque teno mini virus 1, Torque teno mini virus 2, Torque teno mini virus 3, Torque teno mini virus 4, Torque teno mini virus 5, Torque teno mini virus 6, Torque teno mini virus 7, Torque teno mini virus 8, Torque teno mini virus 9, Torque teno mini virus 10, Torque teno mini virus 11, Torque teno mini virus 12, Torque teno tupaia virus, Torque teno tamarin virus, Torque teno felis virus, Torque teno felis virus 2, Torque teno midi virus 1, Torque teno midi virus 2, Torque teno midi virus 3, Torque teno midi virus 4, Torque teno midi virus 5, Torque teno midi virus 6, Torque teno midi virus 7, Torque teno midi virus 8, Torque teno midi virus 9, Torque teno midi virus 10, Torque teno midi virus 11, Torque teno midi virus 12, Torque teno midi virus 13, Torque teno midi virus 14, Torque teno midi virus 15, Chicken anemia virus, Torque teno sus virus 1a, Torque teno sus virus ab, Torque teno sus virus k2a, Torque teno sus virus k2b, Torque teno seal virus 1, Torque teno seal virus 2, Torque teno seal virus 3, Torque teno seal virus 8, Torque teno seal virus 9, Torque teno zalophus virus 1, Torque teno equus virus 1, Torque teno seal virus 4, Torque teno seal virus 5, Torque teno canis virus, Torque teno douroucouli virus, Avocado sunblotch viroid, Eggplant latent viroid, Apple hammerhead viroid, Chrysanthemum chlorotic mottle viroid, Peach latent mosaic viroid, Adoxophyes honmai nucleopolyhedrovirus, Agrotis ipsilon multiple nucleopolyhedrovirus, Agrotis segetum nucleopolyhedrovirus A, Agrotis segetum nucleopolyhedrovirus B, Antheraea pernyi nucleopolyhedrovirus, Anticarsia gemmatalis multiple nucleopolyhedrovirus, Autographa californica multiple nucleopolyhedrovirus, Bombyx mori nucleopolyhedrovirus, Buzura suppressaria nucleopolyhedrovirus, Catopsilia pomona nucleopolyhedrovirus, Choristoneura fumiferana DEF multiple nucleopolyhedrovirus, Choristoneura fumiferana multiple nucleopolyhedrovirus, Choristoneura murinana nucleopolyhedrovirus, Choristoneura rosaceana nucleopolyhedrovirus, Chrysodeixis chalcites nucleopolyhedrovirus, Chrysodeixis includens nucleopolyhedrovirus, Clanis bilineata nucleopolyhedrovirus, Condylorrhiza vestigialis nucleopolyhedrovirus, Cryptophlebia peltastica nucleopolyhedrovirus, Cyclophragma undans nucleopolyhedrovirus, Ectropis obliqua nucleopolyhedrovirus, Epiphyas postvittana nucleopolyhedrovirus, Euproctis pseudoconspersa nucleopolyhedrovirus, Helicoverpa armigera nucleopolyhedrovirus, Hemileuca species nucleopolyhedrovirus, Hyphantria cunea nucleopolyhedrovirus, Hyposidra talaca nucleopolyhedrovirus, Lambdina fiscellaria nucleopolyhedrovirus, Leucania separata nucleopolyhedrovirus, Lonomia obliqua nucleopolyhedrovirus, Lymantria dispar multiple nucleopolyhedrovirus, Lymantria xylina nucleopolyhedrovirus, Mamestra brassicae multiple nucleopolyhedrovirus, Mamestra configurata nucleopolyhedrovirus A, Mamestra configurata nucleopolyhedrovirus B, Maruca vitrata nucleopolyhedrovirus, Mythimna unipuncta nucleopolyhedrovirus A, Mythimna unipuncta nucleopolyhedrovirus B, Operophtera brumata nucleopolyhedrovirus, Orgyia leucostigma nucleopolyhedrovirus, Orgyia pseudotsugata multiple nucleopolyhedrovirus, Oxyplax ochracea nucleopolyhedrovirus, Peridroma saucia nucleopolyhedrovirus, Perigonia lusca nucleopolyhedrovirus, Spodoptera eridania nucleopolyhedrovirus, Spodoptera exempta nucleopolyhedrovirus, Spodoptera exigua multiple nucleopolyhedrovirus, Spodoptera frugiperda multiple nucleopolyhedrovirus, Spodoptera littoralis nucleopolyhedrovirus, Spodoptera litura nucleopolyhedrovirus, Sucra jujuba nucleopolyhedrovirus, Thysanoplusia orichalcea nucleopolyhedrovirus, Trichoplusia ni single nucleopolyhedrovirus, Urbanus proteus nucleopolyhedrovirus, Wiseana signata nucleopolyhedrovirus, Adoxophyes orana granulovirus, Agrotis segetum granulovirus, Artogeia rapae granulovirus, Choristoneura fumiferana granulovirus, Clostera anachoreta granulovirus, Clostera anastomosis granulovirus A, Clostera anastomosis granulovirus B, Cnaphalocrocis medinalis granulovirus, Cryptophlebia leucotreta granulovirus, Cydia pomonella granulovirus, Diatraea saccharalis granulovirus, Epinotia aporema granulovirus, Erinnyis ello granulovirus, Harrisina brillians granulovirus, Helicoverpa armigera granulovirus, Lacanobia oleracea granulovirus, Mocis latipes granulovirus, Mythimna unipuncta granulovirus A, Mythimna unipuncta granulovirus B, Phthorimaea operculella granulovirus, Plodia interpunctella granulovirus, Plutella xylostella granulovirus, Spodoptera frugiperda granulovirus, Spodoptera litura granulovirus, Trichoplusia ni granulovirus, Xestia c-nigrum granulovirus, Culex nigripalpus nucleopolyhedrovirus, Neodiprion lecontei nucleopolyhedrovirus, Neodiprion sertifer nucleopolyhedrovirus, Acidianus two-tailed virus, Aeropyrum pernix bacilliform virus 1, Flavobacterium virus FLiP, Sulfolobus spindle-shaped virus 1, Sulfolobus spindle-shaped virus 2, Sulfolobus spindle-shaped virus 4, Sulfolobus spindle-shaped virus 5, Sulfolobus spindle-shaped virus 7, Sulfolobus spindle-shaped virus 8, Sulfolobus spindle-shaped virus 9, Acidianus spindle-shaped virus 1, Sulfolobus spindle-shaped virus 6, Pyrobaculum spherical virus, Thermoproteus tenax spherical virus 1, Sulfolobus newzealandicus droplet-shaped virus, Aeropyrum pernix ovoid virus 1, Salterprovirus Hisl, Glossina hytrosavirus, Musca hytrosavirus, White spot syndrome virus, Gryllus bimaculatus nudivirus, Oryctes rhinoceros nudivirus, Heliothis zea nudivirus, Sulfolobus ellipsoid virus 1, Acholeplasma virus L2, Apanteles crassicornis bracovirus, Apanteles fumiferanae bracovirus, Ascogaster argentifrons bracovirus, Ascogaster quadridentata bracovirus, Cardiochiles nigriceps bracovirus, Chelonus altitudinis bracovirus, Chelonus blackburni bracovirus, Chelonus inanitus bracovirus, Chelonus insularis bracovirus, Chelonus near curvimaculatus bracovirus, Chelonus texanus bracovirus, Cotesia congregata bracovirus, Cotesia flavipes bracovirus, Cotesia glomerata bracovirus, Cotesia hyphantriae bracovirus, Cotesia kariyai bracovirus, Cotesia marginiventris bracovirus, Cotesia melanoscela bracovirus, Cotesia rubecula bracovirus, Cotesia schaeferi bracovirus, Diolcogaster facetosa bracovirus, Glyptapanteles flavicoxis bracovirus, Glyptapanteles indiensis bracovirus, Glyptapanteles liparidis bracovirus, Hypomicrogaster canadensis bracovirus, Hypomicrogaster ectdytolophae bracovirus, Microplitis croceipes bracovirus, Microplitis demolitor bracovirus, Phanerotoma flavitestacea bracovirus, Pholetesor ornigis bracovirus, Protapanteles paleacritae bracovirus, Tranosema rostrale bracovirus, Campoletis aprilis ichnovirus, Campoletis flavicincta ichnovirus, Campoletis sonorensis ichnovirus, Casinaria arjuna ichnovirus, Casinaria forcipata ichnovirus, Casinaria infesta ichnovirus, Diadegma acronyctae ichnovirus, Diadegma interruptum ichnovirus, Diadegma terebrans ichnovirus, Enytus montanus ichnovirus, Eriborus terebrans ichnovirus, Glypta fumiferanae ichnovirus, Hyposoter annulipes ichnovirus, Hyposoter exiguae ichnovirus, Hyposoter fugitivus ichnovirus, Hyposoter lymantriae ichnovirus, Hyposoter pilosulus ichnovirus, Hyposoter rivalis ichnovirus, Olesicampe benefactor ichnovirus, Olesicampe geniculatae ichnovirus, Synetaeris tenuifemur ichnovirus, Alphaportoglobovirus SPV2, Sulfolobus alphaportoglobovirus 1, Apple dimple fruit viroid, Apple scar skin viroid, Australian grapevine viroid, Citrus bent leaf viroid, Citrus dwarfing viroid, Citrus viroid V, Citrus viroid VI, Grapevine yellow speckle viroid 1, Grapevine yellow speckle viroid 2, Pear blister canker viroid, Citrus bark cracking viroid, Coconut cadang-cadang viroid, Coconut tinangaja viroid, Hop latent viroid, Coleus blumei viroid 1, Coleus blumei viroid 2, Coleus blumei viroid 3, Dahlia latent viroid, Hop stunt viroid, Chrysanthemum stunt viroid, Citrus exocortis viroid, Columnea latent viroid, Iresine viroid 1, Pepper chat fruit viroid, Potato spindle tuber viroid, Tomato apical stunt viroid, Tomato chlorotic dwarf viroid, Tomato planta macho viroid, Aeropyrum coil-shaped virus, Nitmarvirus NSV1, Ageratum leaf curl Buea betasatellite, Ageratum leaf curl Cameroon betasatellite, Ageratum yellow leaf curl betasatellite, Ageratum yellow vein betasatellite, Ageratum yellow vein India betasatellite, Ageratum yellow vein Sri Lanka betasatellite, Alternanthera yellow vein betasatellite, Andrographis yellow vein leaf curl betasatellite, Bhendi yellow vein mosaic betasatellite, Cardiospermum yellow leaf curl betasatellite, Chili leaf curl betasatellite, Chili leaf curl Jaunpur betasatellite, Chili leaf curl Sri Lanka betasatellite, Cotton leaf curl Gezira betasatellite, Cotton leaf curl Multan betasatellite, Croton yellow vein mosaic betasatellite, Eupatorium yellow vein betasatellite, Eupatorium yellow vein mosaic betasatellite, French bean leaf curl betasatellite, Hedyotis yellow mosaic betasatellite, Honeysuckle yellow vein betasatellite, Honeysuckle yellow vein mosaic betasatellite, Malvastrum leaf curl betasatellite, Malvastrum leaf curl Guangdong betasatellite, Mirabilis leaf curl betasatellite, Momordica yellow mosaic betasatellite, Mungbean yellow mosaic betasatellite, Okra leaf curl Oman betasatellite, Papaya leaf curl betasatellite, Papaya leaf curl China betasatellite, Papaya leaf curl India betasatellite, Rhynchosia yellow mosaic betasatellite, Rose leaf curl betasatellite, Siegesbeckia yellow vein betasatellite, Tobacco curly shoot betasatellite, Tobacco leaf curl betasatellite, Tobacco leaf curl Japan betasatellite, Tobacco leaf curl Patna betasatellite, Tomato leaf curl Bangalore betasatellite, Tomato leaf curl Bangladesh betasatellite, Tomato leaf curl betasatellite, Tomato leaf curl China betasatellite, Tomato leaf curl Gandhinagar betasatellite, Tomato leaf curl Java betasatellite, Tomato leaf curl Joydebpur betasatellite, Tomato leaf curl Laguna betasatellite, Tomato leaf curl Laos betasatellite, Tomato leaf curl Malaysia betasatellite, Tomato leaf curl Nepal betasatellite, Tomato leaf curl Patna betasatellite, Tomato leaf curl Philippine betasatellite, Tomato leaf curl Sri Lanka betasatellite, Tomato leaf curl Yemen betasatellite, Tomato yellow leaf curl China betasatellite, Tomato yellow leaf curl Rajasthan betasatellite, Tomato yellow leaf curl Shandong betasatellite, Tomato yellow leaf curl Thailand betasatellite, Tomato yellow leaf curl Vietnam betasatellite, Tomato yellow leaf curl Yunnan betasatellite, Vernonia yellow vein betasatellite, Vernonia yellow vein Fujian betasatellite, Croton yellow vein deltasatellite, Malvastrum leaf curl deltasatellite, Sida golden yellow vein deltasatellite 1, Sida golden yellow vein deltasatellite 2, Sida golden yellow vein deltasatellite 3, Sweet potato leaf curl deltasatellite 1, Sweet potato leaf curl deltasatellite 2, Sweet potato leaf curl deltasatellite 3, Tomato leaf curl deltasatellite, Tomato yellow leaf distortion deltasatellite 1, Tomato yellow leaf distortion deltasatellite 2, Pyrobaculum filamentous virus 1, Thermoproteus tenax virus 1, Hepatitis delta virus, Heterocapsa circularisquama DNA virus 01, and Rhizidiomyces virus. Other viruses include the ICTV Master species list (https://talk.ictvonline.org/files/master-species-lists/m/msl/9601/), which is incorporated by reference herein.

[0290] In further embodiments, the present invention relates to methods of trans-splicing one or more RNA molecule in cells or in vitro. Trans-splicing of independent RNA molecules can be useful for expressing full-length proteins when the nucleic acid sequences encoding said proteins exceed the packaging size for certain plasmids and vectors and for generating multi-domain proteins that are otherwise difficult to express. Further, trans-splicing a single RNA molecule can be useful for deleting sections of RNA that would otherwise be translated into pathological or defective proteins. Additional applications and further discussion of trans-splicing RNA molecules can be found in International Application No. PCT/US2021/016885 (incorporated by reference herein in its entirety).

[0291] In one embodiment, the present invention comprises a method of trans-splicing RNA molecules in vitro. In one embodiment, the method comprises contacting one or more fusion editing protein of the present invention with one or more RNA molecule in vitro, in the presence of one or more targeting nucleic acid. In some embodiments, said one or more RNA molecule comprises a first RNA molecule and a second RNA molecule. In one embodiment, said first RNA molecule and said second RNA molecule are cleaved by the fusion editing protein, generating 2′,3′ cyclic phosphate and 5′ hydroxyl RNA termini. In one embodiment, the method further comprises contacting the first RNA molecule and the second RNA molecule with RtcB ligase, as described above. In one embodiment, the 2′,3′ cyclic phosphate termini of the first RNA molecule is ligated to the 5′ hydroxyl termini of the second RNA molecule, thereby generating a trans-spliced RNA molecule.

[0292] In one embodiment, the present invention comprises a method of trans-splicing RNA molecules in a cell or tissue. In one embodiment, the method comprises administering to one or more cell or tissue one or more fusion editing protein of the present invention and one or more targeting nucleic acid. In one embodiment, the method comprises administering to one or more cell or tissue one or more nucleic acid encoding a fusion editing protein of the present invention and one or more targeting nucleic acid. In some embodiments, the method further comprises administering one or more RNA molecule to the cell or tissue. In some embodiments, the method further comprises administering RtcB ligase or a nucleic acid encoding RtcB ligase, as described above.

[0293] In one embodiment, the present invention comprises a method of treating one or more disease or disorder associated with defective or pathological protein. In one embodiment, the method comprises administering to one or more cell or tissue one or more fusion editing protein of the present invention and one or more targeting nucleic acid. In one embodiment, the method comprises administering to one or more cell or tissue one or more nucleic acid encoding a fusion editing protein of the present invention and one or more targeting nucleic acid. In some embodiments, the method further comprises administering RtcB ligase or a nucleic acid encoding RtcB ligase, as described above.

### Amino Acid and Nucleic Acid Sequences

[0294] Table 2 provides a summary of the amino acid and nucleic acid sequences.

TABLE 2
Summary of sequences

| SEQ | | |
|---|---|---|
| ID NO | Type | Description |
| 1 | Amino Acid | PspCas13b |
| 2 | Amino Acid | PspCas13b Truncation |
| 3 | Amino Acid | AspCas13b |
| 4 | Amino Acid | AspCas13c |
| 5 | Amino Acid | BmaCas13a |
| 6 | Amino Acid | BzoCas13b |
| 7 | Amino Acid | CamCas13a |
| 8 | Amino Acid | CcaCas13b |
| 9 | Amino Acid | Cga2Cas13a |
| 10 | Amino Acid | CgaCas13a |
| 11 | Amino Acid | EbaCas13a |
| 12 | Amino Acid | EreCas13a |
| 13 | Amino Acid | EsCas13d |
| 14 | Amino Acid | FbrCas13b |
| 15 | Amino Acid | FnbCas13c |
| 16 | Amino Acid | FndCas13c |
| 17 | Amino Acid | FnfCas13c |
| 18 | Amino Acid | FnsCas13c |
| 19 | Amino Acid | FpeCas13c |
| 20 | Amino Acid | FulCas13c |
| 21 | Amino Acid | HheCas13a |
| 22 | Amino Acid | LbfCas13a |
| 23 | Amino Acid | LbmCas13a |
| 24 | Amino Acid | LbnCas13a |
| 25 | Amino Acid | LbuCas13a |
| 26 | Amino Acid | LseCas13a |
| 27 | Amino Acid | LshCas13a |
| 28 | Amino Acid | LspCas13a |
| 29 | Amino Acid | Lwa2cas13a |
| 30 | Amino Acid | LwaCas13a |
| 31 | Amino Acid | LweCas13a |
| 32 | Amino Acid | PauCas13b |
| 33 | Amino Acid | PbuCas13b |
| 34 | Amino Acid | PgiCas13b |
| 35 | Amino Acid | PguCas13b |
| 36 | Amino Acid | Pin2Cas13b |
| 37 | Amino Acid | Pin3Cas13b |
| 38 | Amino Acid | PinCas13b |
| 39 | Amino Acid | Pprcas13a |
| 40 | Amino Acid | PsaCas13b |
| 41 | Amino Acid | PsmCas13b |
| 42 | Amino Acid | RanCas13b |
| 43 | Amino Acid | RcdCas13a |
| 44 | Amino Acid | RcrCas13a |
| 45 | Amino Acid | RcsCas13a |
| 46 | Amino Acid | UrCas13d |
| 47 | Amino Acid | dPspCas13b |
| 48 | Amino Acid | dPspCas13b truncation |
| 49 | Amino Acid | Rnase 1 (human) |
| 50 | Amino Acid | Rnase 2 (human) |
| 51 | Amino Acid | Rnase 3 (human) |
| 52 | Amino Acid | Rnase 4 (human) |
| 53 | Amino Acid | Rnase 5 (human) |
| 54 | Amino Acid | Rnase 6 (human) |
| 55 | Amino Acid | Rnase 7 (human) |
| 56 | Amino Acid | Rnase 8 (human) |
| 57 | Amino Acid | Synthetic Tandem Dimer RNase 1 (Human, tdRNase 1) |
| 58 | Amino Acid | RNase A (Bovine RNase1) |
| 59 | Amino Acid | RNase 1 (E. coli, ecRNase 1) |
| 60 | Amino Acid | RNase 1B (P. nemaeus) |
| 61 | Amino Acid | txRNase 1 (RNase 1 R39D/N67D/N88A/G89D/R91D) |
| 62 | Amino Acid | txRNase A (RNase A D38R/R39D/N67R/G88R) |
| 63 | Amino Acid | RNase T1 (A. flavus) |
| 64 | Amino Acid | RNase T1, rA cleaving variant No.1 |
| 65 | Amino Acid | RNase T1, rA cleaving variant No.2 |
| 66 | Amino Acid | RNase T1, rA cleaving variant RNase T1-R2 |
| 67 | Amino Acid | Alpha Sarcin (A. giganteus) |
| 68 | Amino Acid | RNase T1, dsRNA cleaving variant RNase Ta |
| 69 | Amino Acid | BARNASE |
| 70 | Amino Acid | RNASE A, 3x S-peptide-P2A-S-protein |
| 71 | Amino Acid | RNase LE |
| 72 | Amino Acid | Rnase T2 (human) |
| 73 | Amino Acid | Onconase (R. pipiens) |
| 74 | Amino Acid | Erns(C171R) (RNase T2, Bovine viral diarrhea virus) |
| 75 | Amino Acid | RNase U2 (U. sphaerogena) |
| 76 | Amino Acid | PIN RNase domain (Human SMG6) |
| 77 | Amino Acid | Synthetic tandem PIN RNase domain (Human SMG6, tdPIN) |
| 78 | Amino Acid | Bovine seminal ribonuclease (Bovind, SRN) |
| 79 | Amino Acid | Synthetic Tandem Dimer Bovine seminal ribonuclease (Bovind, tdSRN) |
| 80 | Amino Acid | RNase V1 |
| 81 | Amino Acid | Mini RNase III (B. subtilis, MiniR3) |
| 82 | Amino Acid | Synthetic Tandem Dimer Mini RNase III (B. subtilis, tdMiniR3) |
| 83 | Amino Acid | RNase III Domain (Mouse, a.a.1648-1846, DICER) |
| 84 | Amino Acid | Synthetic Tandem Dimer RNase III Domain (Mouse, tdDICER) |
| 85 | Amino Acid | Natural tandem RNase III domain (Human DROSHA a.a. 925-1246, DROSHA) |
| 86 | Amino Acid | Natural tandem RNase III domain Dimer (G. intestinalis DICER, a.a. 292-754 |
| | | giDICER) |
| 87 | Amino Acid | Synthetic tandem RNase III domain (E. coli RNC, tdRNC) |
| 88 | Amino Acid | Ribonuclease HI (Sulfurisphaera tokodaii, RNase HI*) |
| 89 | Amino Acid | Ribonuclease HI(D125N)(Sulfurisphaera tokodaii, RNase HI*D125N) |
| 90 | Amino Acid | S-protein (RNase 1, Human) |
| 91 | Amino Acid | S-peptide (RNase 1, Human) |
| 92 | Amino Acid | S-peptide-linker-ERT2 (RNase 1, Human) |
| 93 | Amino Acid | S-protein (RNase 1B, P. nemaeus) |
| 94 | Amino Acid | S-peptide (RNase 1B, P. nemaeus) |
| 95 | Amino Acid | S-peptide-linker-ERT2 (RNase 1B, P. nemaeus) |
| 96 | Amino Acid | S-protein (RNase A, Bovine) |
| 97 | Amino Acid | S-peptide (RNase A, Bovine) |
| 98 | Amino Acid | S-peptide-linker-ERT2 (RNase A, Bovine) |
| 99 | Amino Acid | 3x S-peptide (RNASE A) |
| 100 | Amino Acid | Linker sequence 1 |
| 101 | Amino Acid | Linker sequence 2 |
| 102 | Amino Acid | Linker sequence 3 |
| 103 | Amino Acid | Linker sequence 4 |
| 104 | Amino Acid | Linker sequence 5 |
| 105 | Amino Acid | Linker sequence 6 |
| 106 | Amino Acid | Linker sequence 7 |
| 107 | Amino Acid | Linker sequence 8 |
| 108 | Amino Acid | Linker sequence 9 |
| 109 | Amino Acid | 3xFlag |
| 110 | Amino Acid | Ty1 NLS |
| 111 | Amino Acid | Ty2 NLS |
| 112 | Amino Acid | MAK11 |
| 113 | Amino Acid | 1xSV40 |
| 114 | Amino Acid | 3xSV40 |
| 115 | Amino Acid | NPM |
| 116 | Amino Acid | STH1 |
| 117 | Amino Acid | INO4 |
| 118 | Amino Acid | Ty1-like NLS O28090-0 |
| 119 | Amino Acid | Ty1-like NLS O50087-0 |
| 120 | Amino Acid | Ty1-like NLS O58353-0 |
| 121 | Amino Acid | Ty1-like NLS Q57602-0 |
| 122 | Amino Acid | Ty1-like NLS Q6L1X9-0 |
| 123 | Amino Acid | Ty1-like NLS A0K3M1-0 |
| 124 | Amino Acid | Ty1-like NLS A0LYZ1-0 |
| 125 | Amino Acid | Ty1-like NLS A1B022-0 |
| 126 | Amino Acid | Ty1-like NLS A1V8A7-0 |
| 127 | Amino Acid | Ty1-like NLS A1VIP6-0 |
| 128 | Amino Acid | Ty1-like NLS A2RDW6-0 |
| 129 | Amino Acid | Ty1-like NLS A2S7H2-0 |
| 130 | Amino Acid | Ty1-like NLS A3MRV0-0 |
| 131 | Amino Acid | Ty1-like NLS A3NEI3-0 |
| 132 | Amino Acid | Ty1-like NLS A3P0B7-0 |
| 133 | Amino Acid | Ty1-like NLS A4JAN6-0 |
| 134 | Amino Acid | Ty1-like NLS A4SUV7-0 |
| 135 | Amino Acid | Ty1-like NLS A5FP03-0 |
| 136 | Amino Acid | Ty1-like NLS A5ILZ2-0 |
| 137 | Amino Acid | Ty1-like NLS A6GY20-0 |
| 138 | Amino Acid | Ty1-like NLS A6LLI5-0 |
| 139 | Amino Acid | Ty1-like NLS A6LQX4-0 |
| 140 | Amino Acid | Ty1-like NLS A8F6X2-0 |
| 141 | Amino Acid | Ty1-like NLS A8G6B7-0 |
| 142 | Amino Acid | Ty1-like NLS A9ADI9-0 |
| 143 | Amino Acid | Ty1-like NLS A9IJ08-0 |
| 144 | Amino Acid | Ty1-like NLS A9IXA1-0 |
| 145 | Amino Acid | Ty1-like NLS A9NEN2-0 |
| 146 | Amino Acid | Ty1-like NLS B0S140-0 |
| 147 | Amino Acid | Ty1-like NLS B1JU18-0 |
| 148 | Amino Acid | Ty1-like NLS B1LBA1-0 |
| 149 | Amino Acid | Ty1-like NLS B1W354-0 |
| 150 | Amino Acid | Ty1-like NLS B1XSP7-0 |
| 151 | Amino Acid | Ty1-like NLS B1YRC6-0 |
| 152 | Amino Acid | Ty1-like NLS B2JIH0-0 |
| 153 | Amino Acid | Ty1-like NLS B2T755-0 |
| 154 | Amino Acid | Ty1-like NLS B2UEM3-0 |
| 155 | Amino Acid | Ty1-like NLS B3PLU0-0 |
| 156 | Amino Acid | Ty1-like NLS B3R7T2-0 |
| 157 | Amino Acid | Ty1-like NLS B4E5B6-0 |
| 158 | Amino Acid | Ty1-like NLS B4S3C9-0 |
| 159 | Amino Acid | Ty1-like NLS B7IHT4-0 |
| 160 | Amino Acid | Ty1-like NLS B8E0X6-0 |
| 161 | Amino Acid | Ty1-like NLS B9K7W0-0 |
| 162 | Amino Acid | Ty1-like NLS C1A494-0 |
| 163 | Amino Acid | Ty1-like NLS C5CE41-0 |
| 164 | Amino Acid | Ty1-like NLS O88058-0 |
| 165 | Amino Acid | Ty1-like NLS P0DG92-0 |
| 166 | Amino Acid | Ty1-like NLS P0DG93-0 |
| 167 | Amino Acid | Ty1-like NLS P60554-0 |
| 168 | Amino Acid | Ty1-like NLS P67354-0 |
| 169 | Amino Acid | Ty1-like NLS P75311-0 |
| 170 | Amino Acid | Ty1-like NLS P75471-0 |
| 171 | Amino Acid | Ty1-like NLS P94372-0 |
| 172 | Amino Acid | Ty1-like NLS Q056Y0-0 |
| 173 | Amino Acid | Ty1-like NLS Q057D7-0 |
| 174 | Amino Acid | Ty1-like NLS Q0AYB7-0 |
| 175 | Amino Acid | Ty1-like NLS Q0BJ50-0 |
| 176 | Amino Acid | Ty1-like NLS Q0K610-0 |
| 177 | Amino Acid | Ty1-like NLS Q0STA4-0 |
| 178 | Amino Acid | Ty1-like NLS Q0STL9-0 |
| 179 | Amino Acid | Ty1-like NLS Q0TQV7-0 |
| 180 | Amino Acid | Ty1-like NLS Q0TR88-0 |
| 181 | Amino Acid | Ty1-like NLS Q12GX5-0 |
| 182 | Amino Acid | Ty1-like NLS Q13TG6-0 |
| 183 | Amino Acid | Ty1-like NLS Q1AWG1-0 |
| 184 | Amino Acid | Ty1-like NLS Q1BRU4-0 |
| 185 | Amino Acid | Ty1-like NLS Q1J5X5-0 |
| 186 | Amino Acid | Ty1-like NLS Q1JAY8-0 |
| 187 | Amino Acid | Ty1-like NLS Q1JG57-0 |
| 188 | Amino Acid | Ty1-like NLS Q1JL34-0 |
| 189 | Amino Acid | Ty1-like NLS Q1LI28-0 |
| 190 | Amino Acid | Ty1-like NLS Q2L2H3-0 |
| 191 | Amino Acid | Ty1-like NLS Q2NIH1-0 |
| 192 | Amino Acid | Ty1-like NLS Q2SU23-0 |
| 193 | Amino Acid | Ty1-like NLS Q39KH1-0 |
| 194 | Amino Acid | Ty1-like NLS Q3JMQ8-0 |
| 195 | Amino Acid | Ty1-like NLS Q3YRL8-0 |
| 196 | Amino Acid | Ty1-like NLS Q46WD9-0 |
| 197 | Amino Acid | Ty1-like NLS Q48SQ4-0 |
| 198 | Amino Acid | Ty1-like NLS Q49418-0 |
| 199 | Amino Acid | Ty1-like NLS Q56307-0 |
| 200 | Amino Acid | Ty1-like NLS Q5LEQ4-0 |
| 201 | Amino Acid | Ty1-like NLS Q5WEJ7-0 |
| 202 | Amino Acid | Ty1-like NLS Q5XBA0-0 |
| 203 | Amino Acid | Ty1-like NLS Q62GK1-0 |
| 204 | Amino Acid | Ty1-like NLS Q63Q07-0 |
| 205 | Amino Acid | Ty1-like NLS Q64VP0-0 |
| 206 | Amino Acid | Ty1-like NLS Q6G3V1-0 |
| 207 | Amino Acid | Ty1-like NLS Q6G5M0-0 |
| 208 | Amino Acid | Ty1-like NLS Q6LLQ8-0 |
| 209 | Amino Acid | Ty1-like NLS Q6MDC1-0 |
| 210 | Amino Acid | Ty1-like NLS Q6MDH4-0 |
| 211 | Amino Acid | Ty1-like NLS Q6ME08-0 |
| 212 | Amino Acid | Ty1-like NLS Q73PH4-0 |
| 213 | Amino Acid | Ty1-like NLS Q7MAD1-0 |
| 214 | Amino Acid | Ty1-like NLS Q7UP72-0 |
| 215 | Amino Acid | Ty1-like NLS Q7VTD6-0 |
| 216 | Amino Acid | Ty1-like NLS Q7W2F9-0 |
| 217 | Amino Acid | Ty1-like NLS Q7WRC8-0 |
| 218 | Amino Acid | Ty1-like NLS Q828D0-0 |
| 219 | Amino Acid | Ty1-like NLS Q895M9-0 |
| 220 | Amino Acid | Ty1-like NLS Q8AAP0-0 |
| 221 | Amino Acid | Ty1-like NLS Q8D1X2-0 |
| 222 | Amino Acid | Ty1-like NLS Q8K908-0 |
| 223 | Amino Acid | Ty1-like NLS Q8P0C9-0 |
| 224 | Amino Acid | Ty1-like NLS Q8XKR1-0 |
| 225 | Amino Acid | Ty1-like NLS Q8XL46-0 |
| 226 | Amino Acid | Ty1-like NLS Q8XV09-0 |
| 227 | Amino Acid | Ty1-like NLS Q93Q47-0 |
| 228 | Amino Acid | Ty1-like NLS Q9L0Q6-0 |
| 229 | Amino Acid | Ty1-like NLS Q9L0Q6-1 |
| 230 | Amino Acid | Ty1-like NLS Q9L0Q6-2 |
| 231 | Amino Acid | Ty1-like NLS Q9L0Q6-3 |
| 232 | Amino Acid | Ty1-like NLS Q9L0Q6-4 |
| 233 | Amino Acid | Ty1-like NLS Q9L0Q6-5 |
| 234 | Amino Acid | Ty1-like NLS Q9L0Q6-6 |
| 235 | Amino Acid | Ty1-like NLS Q9X1S8-0 |
| 236 | Amino Acid | Ty1-like NLS A1CNV8-0 |
| 237 | Amino Acid | Ty1-like NLS A1D1R8-0 |
| 238 | Amino Acid | Ty1-like NLS A1D731-0 |
| 239 | Amino Acid | Ty1-like NLS A2QAX7-0 |
| 240 | Amino Acid | Ty1-like NLS A3LQ55-0 |
| 241 | Amino Acid | Ty1-like NLS A5DGY0-0 |
| 242 | Amino Acid | Ty1-like NLS A5DKW3-0 |
| 243 | Amino Acid | Ty1-like NLS A5DLG8-0 |
| 244 | Amino Acid | Ty1-like NLS A5DY34-0 |
| 245 | Amino Acid | Ty1-like NLS A6RBB0-0 |
| 246 | Amino Acid | Ty1-like NLS A6RMZ2-0 |
| 247 | Amino Acid | Ty1-like NLS A6ZL85-0 |
| 248 | Amino Acid | Ty1-like NLS A6ZZJ1-0 |
| 249 | Amino Acid | Ty1-like NLS A7E4K0-0 |
| 250 | Amino Acid | Ty1-like NLS G0S8I1-0 |
| 251 | Amino Acid | Ty1-like NLS O13527-0 |
| 252 | Amino Acid | Ty1-like NLS O13535-0 |
| 253 | Amino Acid | Ty1-like NLS O13658-0 |
| 254 | Amino Acid | Ty1-like NLS O14064-0 |
| 255 | Amino Acid | Ty1-like NLS O14076-0 |
| 256 | Amino Acid | Ty1-like NLS O42668-0 |
| 257 | Amino Acid | Ty1-like NLS O43068-0 |
| 258 | Amino Acid | Ty1-like NLS O74777-0 |
| 259 | Amino Acid | Ty1-like NLS O74862-0 |
| 260 | Amino Acid | Ty1-like NLS O94383-0 |
| 261 | Amino Acid | Ty1-like NLS O94487-0 |
| 262 | Amino Acid | Ty1-like NLS O94585-0 |
| 263 | Amino Acid | Ty1-like NLS O94652-0 |
| 264 | Amino Acid | Ty1-like NLS P0C2I2-0 |
| 265 | Amino Acid | Ty1-like NLS P0C2I3-0 |
| 266 | Amino Acid | Ty1-like NLS P0C2I5-0 |
| 267 | Amino Acid | Ty1-like NLS P0C2I6-0 |
| 268 | Amino Acid | Ty1-like NLS P0C2I7-0 |
| 269 | Amino Acid | Ty1-like NLS P0C2I9-0 |
| 270 | Amino Acid | Ty1-like NLS P0C2J0-0 |
| 271 | Amino Acid | Ty1-like NLS P0C2J1-0 |
| 272 | Amino Acid | Ty1-like NLS P0C2J3-0 |
| 273 | Amino Acid | Ty1-like NLS P0C2J5-0 |
| 274 | Amino Acid | Ty1-like NLS P0CM98-0 |
| 275 | Amino Acid | Ty1-like NLS P0CM99-0 |
| 276 | Amino Acid | Ty1-like NLS P0CX63-0 |
| 277 | Amino Acid | Ty1-like NLS P0CX64-0 |
| 278 | Amino Acid | Ty1-like NLS P13902-0 |
| 279 | Amino Acid | Ty1-like NLS P14746-0 |
| 280 | Amino Acid | Ty1-like NLS P20484-0 |
| 281 | Amino Acid | Ty1-like NLS P22936-0 |
| 282 | Amino Acid | Ty1-like NLS P25384-0 |
| 283 | Amino Acid | Ty1-like NLS P32597-0 |
| 284 | Amino Acid | Ty1-like NLS P36006-0 |
| 285 | Amino Acid | Ty1-like NLS P36080-0 |
| 286 | Amino Acid | Ty1-like NLS P38112-0 |
| 287 | Amino Acid | Ty1-like NLS P47098-0 |
| 288 | Amino Acid | Ty1-like NLS P47100-0 |
| 289 | Amino Acid | Ty1-like NLS P51599-0 |
| 290 | Amino Acid | Ty1-like NLS P53119-0 |
| 291 | Amino Acid | Ty1-like NLS P53123-0 |
| 292 | Amino Acid | Ty1-like NLS P53125-0 |
| 293 | Amino Acid | Ty1-like NLS Q01301-0 |
| 294 | Amino Acid | Ty1-like NLS Q03434-0 |
| 295 | Amino Acid | Ty1-like NLS Q03494-0 |
| 296 | Amino Acid | Ty1-like NLS Q03612-0 |
| 297 | Amino Acid | Ty1-like NLS Q03619-0 |
| 298 | Amino Acid | Ty1-like NLS Q03707-0 |
| 299 | Amino Acid | Ty1-like NLS Q03855-0 |
| 300 | Amino Acid | Ty1-like NLS Q04214-0 |
| 301 | Amino Acid | Ty1-like NLS Q04500-0 |
| 302 | Amino Acid | Ty1-like NLS Q04670-0 |
| 303 | Amino Acid | Ty1-like NLS Q04711-0 |
| 304 | Amino Acid | Ty1-like NLS Q06132-0 |
| 305 | Amino Acid | Ty1-like NLS Q07163-0 |
| 306 | Amino Acid | Ty1-like NLS Q07509-0 |
| 307 | Amino Acid | Ty1-like NLS Q07791-0 |
| 308 | Amino Acid | Ty1-like NLS Q07793-0 |
| 309 | Amino Acid | Ty1-like NLS Q09094-0 |
| 310 | Amino Acid | Ty1-like NLS Q09180-0 |
| 311 | Amino Acid | Ty1-like NLS Q09180-1 |
| 312 | Amino Acid | Ty1-like NLS Q09180-2 |
| 313 | Amino Acid | Ty1-like NLS Q09863-0 |
| 314 | Amino Acid | Ty1-like NLS Q0U8V9-0 |
| 315 | Amino Acid | Ty1-like NLS Q12088-0 |
| 316 | Amino Acid | Ty1-like NLS Q12112-0 |
| 317 | Amino Acid | Ty1-like NLS Q12113-0 |
| 318 | Amino Acid | Ty1-like NLS Q12141-0 |
| 319 | Amino Acid | Ty1-like NLS Q12193-0 |
| 320 | Amino Acid | Ty1-like NLS Q12269-0 |
| 321 | Amino Acid | Ty1-like NLS Q12273-0 |
| 322 | Amino Acid | Ty1-like NLS Q12316-0 |
| 323 | Amino Acid | Ty1-like NLS Q12337-0 |
| 324 | Amino Acid | Ty1-like NLS Q12339-0 |
| 325 | Amino Acid | Ty1-like NLS Q12414-0 |
| 326 | Amino Acid | Ty1-like NLS Q12472-0 |
| 327 | Amino Acid | Ty1-like NLS Q12490-0 |
| 328 | Amino Acid | Ty1-like NLS Q12491-0 |
| 329 | Amino Acid | Ty1-like NLS Q12501-0 |
| 330 | Amino Acid | Ty1-like NLS Q1DNW5-0 |
| 331 | Amino Acid | Ty1-like NLS Q1EA54-0 |
| 332 | Amino Acid | Ty1-like NLS Q2HFA6-0 |
| 333 | Amino Acid | Ty1-like NLS Q2HFA6-1 |
| 334 | Amino Acid | Ty1-like NLS Q2UQI6-0 |
| 335 | Amino Acid | Ty1-like NLS Q4HZ42-0 |
| 336 | Amino Acid | Ty1-like NLS Q4P6I3-0 |
| 337 | Amino Acid | Ty1-like NLS Q4WHF8-0 |
| 338 | Amino Acid | Ty1-like NLS Q4WRV2-0 |
| 339 | Amino Acid | Ty1-like NLS Q4WXQ7-0 |
| 340 | Amino Acid | Ty1-like NLS Q5A2K0-0 |
| 341 | Amino Acid | Ty1-like NLS Q5A310-0 |
| 342 | Amino Acid | Ty1-like NLS Q5ACW8-0 |
| 343 | Amino Acid | Ty1-like NLS Q5B6K3-0 |
| 344 | Amino Acid | Ty1-like NLS Q6BXL7-0 |
| 345 | Amino Acid | Ty1-like NLS Q6C1L3-0 |
| 346 | Amino Acid | Ty1-like NLS Q6C233-0 |
| 347 | Amino Acid | Ty1-like NLS Q6C2J1-0 |
| 348 | Amino Acid | Ty1-like NLS Q6C7C0-0 |
| 349 | Amino Acid | Ty1-like NLS Q6CJY0-0 |
| 350 | Amino Acid | Ty1-like NLS Q6CJY0-1 |
| 351 | Amino Acid | Ty1-like NLS Q6FML5-0 |
| 352 | Amino Acid | Ty1-like NLS Q75F02-0 |
| 353 | Amino Acid | Ty1-like NLS Q7S2A9-0 |
| 354 | Amino Acid | Ty1-like NLS Q7S9J4-0 |
| 355 | Amino Acid | Ty1-like NLS Q7SFJ3-0 |
| 356 | Amino Acid | Ty1-like NLS Q875K1-0 |
| 357 | Amino Acid | Ty1-like NLS Q8SUT1-0 |
| 358 | Amino Acid | Ty1-like NLS Q8SVI7-0 |
| 359 | Amino Acid | Ty1-like NLS Q8SVI7-1 |
| 360 | Amino Acid | Ty1-like NLS Q92393-0 |
| 361 | Amino Acid | Ty1-like NLS Q99109-0 |
| 362 | Amino Acid | Ty1-like NLS Q99231-0 |
| 363 | Amino Acid | Ty1-like NLS Q99337-0 |
| 364 | Amino Acid | Ty1-like NLS Q9USK2-0 |
| 365 | Amino Acid | Ty1-like NLS Q9UTQ5-0 |
| 366 | Amino Acid | Ty1-like NLS A7MD48-0 |
| 367 | Amino Acid | Ty1-like NLS O15446-0 |
| 368 | Amino Acid | Ty1-like NLS O15446-1 |
| 369 | Amino Acid | Ty1-like NLS O15446-2 |
| 370 | Amino Acid | Ty1-like NLS O43148-0 |
| 371 | Amino Acid | Ty1-like NLS O60271-0 |
| 372 | Amino Acid | Ty1-like NLS O75128-0 |
| 373 | Amino Acid | Ty1-like NLS O75400-0 |
| 374 | Amino Acid | Ty1-like NLS O75691-0 |
| 375 | Amino Acid | Ty1-like NLS O75937-0 |
| 376 | Amino Acid | Ty1-like NLS O76021-0 |
| 377 | Amino Acid | Ty1-like NLS O94964-0 |
| 378 | Amino Acid | Ty1-like NLS P23497-0 |
| 379 | Amino Acid | Ty1-like NLS P30414-0 |
| 380 | Amino Acid | Ty1-like NLS P42081-0 |
| 381 | Amino Acid | Ty1-like NLS P46100-0 |
| 382 | Amino Acid | Ty1-like NLS P51608-0 |
| 383 | Amino Acid | Ty1-like NLS P59797-0 |
| 384 | Amino Acid | Ty1-like NLS P82979-0 |
| 385 | Amino Acid | Ty1-like NLS Q12830-0 |
| 386 | Amino Acid | Ty1-like NLS Q13409-0 |
| 387 | Amino Acid | Ty1-like NLS Q13427-0 |
| 388 | Amino Acid | Ty1-like NLS Q15361-0 |
| 389 | Amino Acid | Ty1-like NLS Q15361-1 |
| 390 | Amino Acid | Ty1-like NLS Q53SF7-0 |
| 391 | Amino Acid | Ty1-like NLS Q5M9Q1-0 |
| 392 | Amino Acid | Ty1-like NLS Q5T3I0-0 |
| 393 | Amino Acid | Ty1-like NLS Q5T3I0-1 |
| 394 | Amino Acid | Ty1-like NLS Q68D10-0 |
| 395 | Amino Acid | Ty1-like NLS Q6IPR3-0 |
| 396 | Amino Acid | Ty1-like NLS Q6PD62-0 |
| 397 | Amino Acid | Ty1-like NLS Q6PD62-1 |
| 398 | Amino Acid | Ty1-like NLS Q6PD62-2 |
| 399 | Amino Acid | Ty1-like NLS Q6S8J7-0 |
| 400 | Amino Acid | Ty1-like NLS Q6ZU65-0 |
| 401 | Amino Acid | Ty1-like NLS Q7Z7B0-0 |
| 402 | Amino Acid | Ty1-like NLS Q8N9E0-0 |
| 403 | Amino Acid | Ty1-like NLS Q8NCU4-0 |
| 404 | Amino Acid | Ty1-like NLS Q8NFU7-0 |
| 405 | Amino Acid | Ty1-like NLS Q96DY2-0 |
| 406 | Amino Acid | Ty1-like NLS Q96GD3-0 |
| 407 | Amino Acid | Ty1-like NLS Q96P65-0 |
| 408 | Amino Acid | Ty1-like NLS Q96QC0-0 |
| 409 | Amino Acid | Ty1-like NLS Q9BQG0-0 |
| 410 | Amino Acid | Ty1-like NLS Q9BQG0-1 |
| 411 | Amino Acid | Ty1-like NLS Q9BRU9-0 |
| 412 | Amino Acid | Ty1-like NLS Q9H0S4-0 |
| 413 | Amino Acid | Ty1-like NLS Q9H6F5-0 |
| 414 | Amino Acid | Ty1-like NLS Q9HCK1-0 |
| 415 | Amino Acid | Ty1-like NLS Q9HCK8-0 |
| 416 | Amino Acid | Ty1-like NLS Q9NPI1-0 |
| 417 | Amino Acid | Ty1-like NLS Q9NSV4-0 |
| 418 | Amino Acid | Ty1-like NLS Q9NUL3-0 |
| 419 | Amino Acid | Ty1-like NLS Q9NWT1-0 |
| 420 | Amino Acid | Ty1-like NLS Q9NX58-0 |
| 421 | Amino Acid | Ty1-like NLS Q9UGU5-0 |
| 422 | Amino Acid | Ty1-like NLS Q9UNS1-0 |
| 423 | Amino Acid | Ty1-like NLS Q9Y2X3-0 |
| 424 | Amino Acid | Ty1-like NLS Q9Y6X0-0 |
| 425 | Amino Acid | Ty1-like NLS A0A1I8M2I8-0 |
| 426 | Amino Acid | Ty1-like NLS A1XDC0-0 |
| 427 | Amino Acid | Ty1-like NLS A7S6A5-0 |
| 428 | Amino Acid | Ty1-like NLS A8XI07-0 |
| 429 | Amino Acid | Ty1-like NLS A8XI07-1 |
| 430 | Amino Acid | Ty1-like NLS C0HKU9-0 |
| 431 | Amino Acid | Ty1-like NLS C6KTD2-0 |
| 432 | Amino Acid | Ty1-like NLS O16140-0 |
| 433 | Amino Acid | Ty1-like NLS O17828-0 |
| 434 | Amino Acid | Ty1-like NLS O17966-0 |
| 435 | Amino Acid | Ty1-like NLS O44410-0 |
| 436 | Amino Acid | Ty1-like NLS O44410-1 |
| 437 | Amino Acid | Ty1-like NLS O45244-0 |
| 438 | Amino Acid | Ty1-like NLS P0DP78-0 |
| 439 | Amino Acid | Ty1-like NLS P0DP78-1 |
| 440 | Amino Acid | Ty1-like NLS P0DP79-0 |
| 441 | Amino Acid | Ty1-like NLS P0DP79-1 |
| 442 | Amino Acid | Ty1-like NLS P0DP80-0 |
| 443 | Amino Acid | Ty1-like NLS P0DP80-1 |
| 444 | Amino Acid | Ty1-like NLS P0DP81-0 |
| 445 | Amino Acid | Ty1-like NLS P0DP81-1 |
| 446 | Amino Acid | Ty1-like NLS P14196-0 |
| 447 | Amino Acid | Ty1-like NLS P22058-0 |
| 448 | Amino Acid | Ty1-like NLS P26023-0 |
| 449 | Amino Acid | Ty1-like NLS P26991-0 |
| 450 | Amino Acid | Ty1-like NLS P35978-0 |
| 451 | Amino Acid | Ty1-like NLS P46758-0 |
| 452 | Amino Acid | Ty1-like NLS P46758-1 |
| 453 | Amino Acid | Ty1-like NLS P46867-0 |
| 454 | Amino Acid | Ty1-like NLS P54644-0 |
| 455 | Amino Acid | Ty1-like NLS P54812-0 |
| 456 | Amino Acid | Ty1-like NLS P83212-0 |
| 457 | Amino Acid | Ty1-like NLS Q04621-0 |
| 458 | Amino Acid | Ty1-like NLS Q08696-0 |
| 459 | Amino Acid | Ty1-like NLS Q08696-1 |
| 460 | Amino Acid | Ty1-like NLS Q08696-2 |
| 461 | Amino Acid | Ty1-like NLS Q08696-3 |
| 462 | Amino Acid | Ty1-like NLS Q08696-4 |
| 463 | Amino Acid | Ty1-like NLS Q08696-5 |
| 464 | Amino Acid | Ty1-like NLS Q08696-6 |
| 465 | Amino Acid | Ty1-like NLS Q09223-0 |
| 466 | Amino Acid | Ty1-like NLS Q09595-0 |
| 467 | Amino Acid | Ty1-like NLS Q1ELU8-0 |
| 468 | Amino Acid | Ty1-like NLS Q23120-0 |
| 469 | Amino Acid | Ty1-like NLS Q23272-0 |
| 470 | Amino Acid | Ty1-like NLS Q24537-0 |
| 471 | Amino Acid | Ty1-like NLS Q27450-0 |
| 472 | Amino Acid | Ty1-like NLS Q29DY1-0 |
| 473 | Amino Acid | Ty1-like NLS Q4N4T9-0 |
| 474 | Amino Acid | Ty1-like NLS Q54QQ2-0 |
| 475 | Amino Acid | Ty1-like NLS Q54QQ2-1 |
| 476 | Amino Acid | Ty1-like NLS Q54S20-0 |
| 477 | Amino Acid | Ty1-like NLS Q54US6-0 |
| 478 | Amino Acid | Ty1-like NLS Q54VU4-0 |
| 479 | Amino Acid | Ty1-like NLS Q54XP6-0 |
| 480 | Amino Acid | Ty1-like NLS Q551H0-0 |
| 481 | Amino Acid | Ty1-like NLS Q557G1-0 |
| 482 | Amino Acid | Ty1-like NLS Q55CE0-0 |
| 483 | Amino Acid | Ty1-like NLS Q61R02-0 |
| 484 | Amino Acid | Ty1-like NLS Q75JP5-0 |
| 485 | Amino Acid | Ty1-like NLS Q8I5P7-0 |
| 486 | Amino Acid | Ty1-like NLS Q8I5P7-1 |
| 487 | Amino Acid | Ty1-like NLS Q8IBP1-0 |
| 488 | Amino Acid | Ty1-like NLS Q8ILR9-0 |
| 489 | Amino Acid | Ty1-like NLS Q93591-0 |
| 490 | Amino Acid | Ty1-like NLS Q95Y36-0 |
| 491 | Amino Acid | Ty1-like NLS Q9NBL2-0 |
| 492 | Amino Acid | Ty1-like NLS Q9NDE8-0 |
| 493 | Amino Acid | Ty1-like NLS Q9NDE8-1 |
| 494 | Amino Acid | Ty1-like NLS Q9NDE8-2 |
| 495 | Amino Acid | Ty1-like NLS Q9V5P6-0 |
| 496 | Amino Acid | Ty1-like NLS Q9VDS6-0 |
| 497 | Amino Acid | Ty1-like NLS Q9VGW1-0 |
| 498 | Amino Acid | Ty1-like NLS Q9VH89-0 |
| 499 | Amino Acid | Ty1-like NLS Q9VKM6-0 |
| 500 | Amino Acid | Ty1-like NLS Q9VNH1-0 |
| 501 | Amino Acid | Ty1-like NLS Q9W261-0 |
| 502 | Amino Acid | Ty1-like NLS E1B7L7-0 |
| 503 | Amino Acid | Ty1-like NLS Q08DU1-0 |
| 504 | Amino Acid | Ty1-like NLS Q0III3-0 |
| 505 | Amino Acid | Ty1-like NLS Q17QH9-0 |
| 506 | Amino Acid | Ty1-like NLS Q29S22-0 |
| 507 | Amino Acid | Ty1-like NLS Q2KIQ2-0 |
| 508 | Amino Acid | Ty1-like NLS Q2KJE1-0 |
| 509 | Amino Acid | Ty1-like NLS Q2KJE1-1 |
| 510 | Amino Acid | Ty1-like NLS Q2TBX7-0 |
| 511 | Amino Acid | Ty1-like NLS Q4R7K1-0 |
| 512 | Amino Acid | Ty1-like NLS Q4R8Y5-0 |
| 513 | Amino Acid | Ty1-like NLS Q58DE2-0 |
| 514 | Amino Acid | Ty1-like NLS Q58DU0-0 |
| 515 | Amino Acid | Ty1-like NLS Q5E9U4-0 |
| 516 | Amino Acid | Ty1-like NLS Q5NVM2-0 |
| 517 | Amino Acid | Ty1-like NLS Q5R4V4-0 |
| 518 | Amino Acid | Ty1-like NLS Q5R8B0-0 |
| 519 | Amino Acid | Ty1-like NLS Q5RB69-0 |
| 520 | Amino Acid | Ty1-like NLS Q5RCE6-0 |
| 521 | Amino Acid | Ty1-like NLS Q5TM61-0 |
| 522 | Amino Acid | Ty1-like NLS Q767K9-0 |
| 523 | Amino Acid | Ty1-like NLS Q7YQM3-0 |
| 524 | Amino Acid | Ty1-like NLS Q7YQM4-0 |
| 525 | Amino Acid | Ty1-like NLS Q7YR38-0 |
| 526 | Amino Acid | Ty1-like NLS Q95KD7-0 |
| 527 | Amino Acid | Ty1-like NLS Q95LG8-0 |
| 528 | Amino Acid | Ty1-like NLS Q9N1Q7-0 |
| 529 | Amino Acid | Ty1-like NLS A2WSD3-0 |
| 530 | Amino Acid | Ty1-like NLS A2XVF7-0 |
| 531 | Amino Acid | Ty1-like NLS A2XVF7-1 |
| 532 | Amino Acid | Ty1-like NLS A2XVF7-2 |
| 533 | Amino Acid | Ty1-like NLS A2XVF7-3 |
| 534 | Amino Acid | Ty1-like NLS A3AVH5-0 |
| 535 | Amino Acid | Ty1-like NLS A3AVH5-1 |
| 536 | Amino Acid | Ty1-like NLS A3AVH5-2 |
| 537 | Amino Acid | Ty1-like NLS A3AVH5-3 |
| 538 | Amino Acid | Ty1-like NLS A4QJZ0-0 |
| 539 | Amino Acid | Ty1-like NLS A4QK78-0 |
| 540 | Amino Acid | Ty1-like NLS A4QKG5-0 |
| 541 | Amino Acid | Ty1-like NLS A4QKQ3-0 |
| 542 | Amino Acid | Ty1-like NLS A6MN03-0 |
| 543 | Amino Acid | Ty1-like NLS A8MS85-0 |
| 544 | Amino Acid | Ty1-like NLS A9XMT3-0 |
| 545 | Amino Acid | Ty1-like NLS B8YIE8-0 |
| 546 | Amino Acid | Ty1-like NLS F4HVZ5-0 |
| 547 | Amino Acid | Ty1-like NLS F4IQK5-0 |
| 548 | Amino Acid | Ty1-like NLS F4IQK5-1 |
| 549 | Amino Acid | Ty1-like NLS O22812-0 |
| 550 | Amino Acid | Ty1-like NLS O49323-0 |
| 551 | Amino Acid | Ty1-like NLS O64571-0 |
| 552 | Amino Acid | Ty1-like NLS O64639-0 |
| 553 | Amino Acid | Ty1-like NLS O64639-1 |
| 554 | Amino Acid | Ty1-like NLS O64639-2 |
| 555 | Amino Acid | Ty1-like NLS O65743-0 |
| 556 | Amino Acid | Ty1-like NLS O81072-0 |
| 557 | Amino Acid | Ty1-like NLS P09975-0 |
| 558 | Amino Acid | Ty1-like NLS P0C262-0 |
| 559 | Amino Acid | Ty1-like NLS P29345-0 |
| 560 | Amino Acid | Ty1-like NLS P50888-0 |
| 561 | Amino Acid | Ty1-like NLS P51269-0 |
| 562 | Amino Acid | Ty1-like NLS P51430-0 |
| 563 | Amino Acid | Ty1-like NLS Q06FP6-0 |
| 564 | Amino Acid | Ty1-like NLS Q06FP6-1 |
| 565 | Amino Acid | Ty1-like NLS Q06FP6-2 |
| 566 | Amino Acid | Ty1-like NLS Q06R72-0 |
| 567 | Amino Acid | Ty1-like NLS Q06R98-0 |
| 568 | Amino Acid | Ty1-like NLS Q1KVQ9-0 |
| 569 | Amino Acid | Ty1-like NLS Q1XDL7-0 |
| 570 | Amino Acid | Ty1-like NLS Q38873-0 |
| 571 | Amino Acid | Ty1-like NLS Q3E8X3-0 |
| 572 | Amino Acid | Ty1-like NLS Q3ZJ77-0 |
| 573 | Amino Acid | Ty1-like NLS Q42438-0 |
| 574 | Amino Acid | Ty1-like NLS Q4V3E0-0 |
| 575 | Amino Acid | Ty1-like NLS Q66GN2-0 |
| 576 | Amino Acid | Ty1-like NLS Q6K5K2-0 |
| 577 | Amino Acid | Ty1-like NLS Q6YS30-0 |
| 578 | Amino Acid | Ty1-like NLS Q84WK0-0 |
| 579 | Amino Acid | Ty1-like NLS Q84Y18-0 |
| 580 | Amino Acid | Ty1-like NLS Q8H991-0 |
| 581 | Amino Acid | Ty1-like NLS Q8RWY7-0 |
| 582 | Amino Acid | Ty1-like NLS Q8RWY7-1 |
| 583 | Amino Acid | Ty1-like NLS Q8VZ67-0 |
| 584 | Amino Acid | Ty1-like NLS Q8VZN4-0 |
| 585 | Amino Acid | Ty1-like NLS Q8W0K2-0 |
| 586 | Amino Acid | Ty1-like NLS Q8W490-0 |
| 587 | Amino Acid | Ty1-like NLS Q9CAE4-0 |
| 588 | Amino Acid | Ty1-like NLS Q9FMZ4-0 |
| 589 | Amino Acid | Ty1-like NLS Q9FMZ4-1 |
| 590 | Amino Acid | Ty1-like NLS Q9FRI0-0 |
| 591 | Amino Acid | Ty1-like NLS Q9LKI5-0 |
| 592 | Amino Acid | Ty1-like NLS Q9LUJ5-0 |
| 593 | Amino Acid | Ty1-like NLS Q9LUR0-0 |
| 594 | Amino Acid | Ty1-like NLS Q9LVU8-0 |
| 595 | Amino Acid | Ty1-like NLS Q9LVU8-1 |
| 596 | Amino Acid | Ty1-like NLS Q9LYK7-0 |
| 597 | Amino Acid | Ty1-like NLS Q9M020-0 |
| 598 | Amino Acid | Ty1-like NLS Q9M1L7-0 |
| 599 | Amino Acid | Ty1-like NLS Q9M3V8-0 |
| 600 | Amino Acid | Ty1-like NLS Q9SRQ3-0 |
| 601 | Amino Acid | Ty1-like NLS Q9ZPV5-0 |
| 602 | Amino Acid | Ty1-like NLS B1AQJ2-0 |
| 603 | Amino Acid | Ty1-like NLS D3ZUI5-0 |
| 604 | Amino Acid | Ty1-like NLS D4A666-0 |
| 605 | Amino Acid | Ty1-like NLS E1U8D0-0 |
| 606 | Amino Acid | Ty1-like NLS G3V8T1-0 |
| 607 | Amino Acid | Ty1-like NLS O35821-0 |
| 608 | Amino Acid | Ty1-like NLS O88487-0 |
| 609 | Amino Acid | Ty1-like NLS O88665-0 |
| 610 | Amino Acid | Ty1-like NLS P61364-0 |
| 611 | Amino Acid | Ty1-like NLS P61365-0 |
| 612 | Amino Acid | Ty1-like NLS P83858-0 |
| 613 | Amino Acid | Ty1-like NLS P83861-0 |
| 614 | Amino Acid | Ty1-like NLS Q00566-0 |
| 615 | Amino Acid | Ty1-like NLS Q05CL8-0 |
| 616 | Amino Acid | Ty1-like NLS Q09XV5-0 |
| 617 | Amino Acid | Ty1-like NLS Q3TFK5-0 |
| 618 | Amino Acid | Ty1-like NLS Q3TFK5-1 |
| 619 | Amino Acid | Ty1-like NLS Q3TFK5-2 |
| 620 | Amino Acid | Ty1-like NLS Q3TYA6-0 |
| 621 | Amino Acid | Ty1-like NLS Q3UMF0-0 |
| 622 | Amino Acid | Ty1-like NLS Q498U4-0 |
| 623 | Amino Acid | Ty1-like NLS Q4V7C4-0 |
| 624 | Amino Acid | Ty1-like NLS Q4V8G7-0 |
| 625 | Amino Acid | Ty1-like NLS Q505I5-0 |
| 626 | Amino Acid | Ty1-like NLS Q562C7-0 |
| 627 | Amino Acid | Ty1-like NLS Q566R3-0 |
| 628 | Amino Acid | Ty1-like NLS Q566R3-1 |
| 629 | Amino Acid | Ty1-like NLS Q566R3-2 |
| 630 | Amino Acid | Ty1-like NLS Q58A65-0 |
| 631 | Amino Acid | Ty1-like NLS Q5NBX1-0 |
| 632 | Amino Acid | Ty1-like NLS Q5XG71-0 |
| 633 | Amino Acid | Ty1-like NLS Q5XI01-0 |
| 634 | Amino Acid | Ty1-like NLS Q5XIB5-0 |
| 635 | Amino Acid | Ty1-like NLS Q5XIR6-0 |
| 636 | Amino Acid | Ty1-like NLS Q60848-0 |
| 637 | Amino Acid | Ty1-like NLS Q62018-0 |
| 638 | Amino Acid | Ty1-like NLS Q62018-1 |
| 639 | Amino Acid | Ty1-like NLS Q62187-0 |
| 640 | Amino Acid | Ty1-like NLS Q62871-0 |
| 641 | Amino Acid | Ty1-like NLS Q63520-0 |
| 642 | Amino Acid | Ty1-like NLS Q642C0-0 |
| 643 | Amino Acid | Ty1-like NLS Q68SB1-0 |
| 644 | Amino Acid | Ty1-like NLS Q6AYK5-0 |
| 645 | Amino Acid | Ty1-like NLS Q6NZB0-0 |
| 646 | Amino Acid | Ty1-like NLS Q76KJ5-0 |
| 647 | Amino Acid | Ty1-like NLS Q76KJ5-1 |
| 648 | Amino Acid | Ty1-like NLS Q76KJ5-2 |
| 649 | Amino Acid | Ty1-like NLS Q78WZ7-0 |
| 650 | Amino Acid | Ty1-like NLS Q78WZ7-1 |
| 651 | Amino Acid | Ty1-like NLS Q7TNB4-0 |
| 652 | Amino Acid | Ty1-like NLS Q7TPV4-0 |
| 653 | Amino Acid | Ty1-like NLS Q80WC1-0 |
| 654 | Amino Acid | Ty1-like NLS Q80Z37-0 |
| 655 | Amino Acid | Ty1-like NLS Q811R2-0 |
| 656 | Amino Acid | Ty1-like NLS Q8BKA3-0 |
| 657 | Amino Acid | Ty1-like NLS Q8CJ67-0 |
| 658 | Amino Acid | Ty1-like NLS Q8K214-0 |
| 659 | Amino Acid | Ty1-like NLS Q8K4T4-0 |
| 660 | Amino Acid | Ty1-like NLS Q8R5F3-0 |
| 661 | Amino Acid | Ty1-like NLS Q91X13-0 |
| 662 | Amino Acid | Ty1-like NLS Q9CS72-0 |
| 663 | Amino Acid | Ty1-like NLS Q9CVI2-0 |
| 664 | Amino Acid | Ty1-like NLS Q9CWX9-0 |
| 665 | Amino Acid | Ty1-like NLS Q9CZX5-0 |
| 666 | Amino Acid | Ty1-like NLS Q9D1J3-0 |
| 667 | Amino Acid | Ty1-like NLS Q9D3V1-0 |
| 668 | Amino Acid | Ty1-like NLS Q9DBQ9-0 |
| 669 | Amino Acid | Ty1-like NLS Q9JIX5-0 |
| 670 | Amino Acid | Ty1-like NLS Q9JJ80-0 |
| 671 | Amino Acid | Ty1-like NLS Q9JJ89-0 |
| 672 | Amino Acid | Ty1-like NLS Q9R1C7-0 |
| 673 | Amino Acid | Ty1-like NLS Q9R1X4-0 |
| 674 | Amino Acid | Ty1-like NLS Q9Z180-0 |
| 675 | Amino Acid | Ty1-like NLS Q9Z207-0 |
| 676 | Amino Acid | Ty1-like NLS Q9Z2D6-0 |
| 677 | Amino Acid | Ty1-like NLS A0A1L8GSA2-0 |
| 678 | Amino Acid | Ty1-like NLS A0JP82-0 |
| 679 | Amino Acid | Ty1-like NLS A1A5I1-0 |
| 680 | Amino Acid | Ty1-like NLS A1L2T6-0 |
| 681 | Amino Acid | Ty1-like NLS A2RUV0-0 |
| 682 | Amino Acid | Ty1-like NLS A9JRD8-0 |
| 683 | Amino Acid | Ty1-like NLS E7F568-0 |
| 684 | Amino Acid | Ty1-like NLS F1QFU0-0 |
| 685 | Amino Acid | Ty1-like NLS F1QWK4-0 |
| 686 | Amino Acid | Ty1-like NLS K9JHZ4-0 |
| 687 | Amino Acid | Ty1-like NLS P07193-0 |
| 688 | Amino Acid | Ty1-like NLS P0CB65-0 |
| 689 | Amino Acid | Ty1-like NLS P12957-0 |
| 690 | Amino Acid | Ty1-like NLS P13505-0 |
| 691 | Amino Acid | Ty1-like NLS P21783-0 |
| 692 | Amino Acid | Ty1-like NLS Q28BS0-0 |
| 693 | Amino Acid | Ty1-like NLS Q28BS0-1 |
| 694 | Amino Acid | Ty1-like NLS Q28G05-0 |
| 695 | Amino Acid | Ty1-like NLS Q32N87-0 |
| 696 | Amino Acid | Ty1-like NLS Q3KPW4-0 |
| 697 | Amino Acid | Ty1-like NLS Q4QR29-0 |
| 698 | Amino Acid | Ty1-like NLS Q4QR29-1 |
| 699 | Amino Acid | Ty1-like NLS Q5BL56-0 |
| 700 | Amino Acid | Ty1-like NLS Q5XJK9-0 |
| 701 | Amino Acid | Ty1-like NLS Q5ZIJ0-0 |
| 702 | Amino Acid | Ty1-like NLS Q640I9-0 |
| 703 | Amino Acid | Ty1-like NLS Q6DEU9-0 |
| 704 | Amino Acid | Ty1-like NLS Q6DEU9-1 |
| 705 | Amino Acid | Ty1-like NLS Q6DEU9-2 |
| 706 | Amino Acid | Ty1-like NLS Q6DK85-0 |
| 707 | Amino Acid | Ty1-like NLS Q6DRI7-0 |
| 708 | Amino Acid | Ty1-like NLS Q6DRL5-0 |
| 709 | Amino Acid | Ty1-like NLS Q6NV26-0 |
| 710 | Amino Acid | Ty1-like NLS Q6NWI1-0 |
| 711 | Amino Acid | Ty1-like NLS Q6NYJ3-0 |
| 712 | Amino Acid | Ty1-like NLS Q6P4K1-0 |
| 713 | Amino Acid | Ty1-like NLS Q6WKW9-0 |
| 714 | Amino Acid | Ty1-like NLS Q7ZUF2-0 |
| 715 | Amino Acid | Ty1-like NLS Q7ZW47-0 |
| 716 | Amino Acid | Ty1-like NLS Q7ZXZ0-0 |
| 717 | Amino Acid | Ty1-like NLS Q7ZXZ0-1 |
| 718 | Amino Acid | Ty1-like NLS Q7ZYR8-0 |
| 719 | Amino Acid | Ty1-like NLS Q8AVQ6-0 |
| 720 | Amino Acid | Ty1-like NLS Q9DE07-0 |
| 721 | Amino Acid | Ty1-like NLS P03086-0 |
| 722 | Amino Acid | Ty1-like NLS P09814-0 |
| 723 | Amino Acid | Ty1-like NLS P0CK10-0 |
| 724 | Amino Acid | Ty1-like NLS P15075-0 |
| 725 | Amino Acid | Ty1-like NLS P51724-0 |
| 726 | Amino Acid | Ty1-like NLS P52344-0 |
| 727 | Amino Acid | Ty1-like NLS P52531-0 |
| 728 | Amino Acid | Ty1-like NLS Q5UP41-0 |
| 729 | Amino Acid | Ty1-like NLS Q9DUC0-0 |
| 730 | Amino Acid | Ty1-like NLS Q9XJS3-0 |
| 731 | Amino Acid | eraseR (3xFLAG-Ty1NLS-PspCas13b) |
| 732 | Amino Acid | CRISPRase - 3xFLAG-Ty1NLS-dPspCas13b-linker-RNase |
| 733 | Amino Acid | short CRISPRase - 3xFLAG-Ty1NLS-dPspCas13b-linker-RNase |
| 734 | Nucleic Acid | PspCas13b |
| 735 | Nucleic Acid | PspCas13b Truncation |
| 736 | Nucleic Acid | dPspCas13b |
| 737 | Nucleic Acid | dPspCas13b truncation |
| 738 | Nucleic Acid | Rnase 1 (human) |
| 739 | Nucleic Acid | Rnase 2 (human) |
| 740 | Nucleic Acid | Rnase 3 (human) |
| 741 | Nucleic Acid | Rnase 4 (human) |
| 742 | Nucleic Acid | Rnase 5 (human) |
| 743 | Nucleic Acid | Rnase 6 (human) |
| 744 | Nucleic Acid | Rnase 7 (human) |
| 745 | Nucleic Acid | Rnase 8 (human) |
| 746 | Nucleic Acid | Synthetic Tandem Dimer RNase 1 (Human, tdRNase 1) |
| 747 | Nucleic Acid | RNase A (Bovine RNase1) |
| 748 | Nucleic Acid | RNase 1 (E. coli, ecRNase 1) |
| 749 | Nucleic Acid | RNase 1B (P. nemaeus) |
| 750 | Nucleic Acid | txRNase 1 (RNase 1 R39D/N67D/N88A/G89D/R91D) |
| 751 | Nucleic Acid | txRNase A (RNase A D38R/R39D/N67R/G88R) |
| 752 | Nucleic Acid | RNase T1 (A. flavus) |
| 753 | Nucleic Acid | RNase T1, rA cleaving variant No.1 |
| 754 | Nucleic Acid | RNase T1, rA cleaving variant No.2 |
| 755 | Nucleic Acid | RNase T1, rA cleaving variant RNase T1-R2 |
| 756 | Nucleic Acid | Alpha Sarcin (A. giganteus) |
| 757 | Nucleic Acid | RNase T1, dsRNA cleaving variant RNase Ta |
| 758 | Nucleic Acid | BARNASE |
| 759 | Nucleic Acid | BARNASE + chimeric intron |
| 760 | Nucleic Acid | RNASE A, 3x S-peptide-P2A-S-protein |
| 761 | Nucleic Acid | RNase LE |
| 762 | Nucleic Acid | Rnase T2 (human) |
| 763 | Nucleic Acid | Onconase (R. pipiens) |
| 764 | Nucleic Acid | Erns(C171R) (RNase T2, Bovine viral diarrhea virus) |
| 765 | Nucleic Acid | RNase U2 (U. sphaerogena) |
| 766 | Nucleic Acid | PIN RNase domain (Human SMG6) |
| 767 | Nucleic Acid | Synthetic tandem PIN RNase domain (Human SMG6, tdPIN) |
| 768 | Nucleic Acid | Bovine seminal ribonuclease (Bovind, SRN) |
| 769 | Nucleic Acid | Synthetic Tandem Dimer Bovine seminal ribonuclease (Bovind, SRN) |
| 770 | Nucleic Acid | RNase V1 |
| 771 | Nucleic Acid | Mini RNase III (B. subtilis, MiniR3) |
| 772 | Nucleic Acid | Synthetic Tandem Dimer Mini RNase III (B. subtilis, tdMiniR3) |
| 773 | Nucleic Acid | RNase III Domain (Mouse, a.a.1648-1846, DICER) |
| 774 | Nucleic Acid | Synthetic Tandem Dimer RNase III Domain (Mouse, tdDICER) |
| 775 | Nucleic Acid | Natural tandem RNase III domain (Human DROSHA a.a. 925-1246, DROSHA) |
| 776 | Nucleic Acid | Natural tandem RNase III domain Dimer (G. intestinalis DICER, a.a. 292-754 |
| | | giDICER) |
| 777 | Nucleic Acid | Synthetic tandem RNase III domain (E. coli RNC, tdRNC) |
| 778 | Nucleic Acid | Ribonuclease HI (Sulfurisphaera tokodaii, RNase HI*) |
| 779 | Nucleic Acid | Ribonuclease HI(D125N)(Sulfurisphaera tokodaii, RNase HI*D125N) |
| 780 | Nucleic Acid | S-protein (RNase 1, Human) |
| 781 | Nucleic Acid | S-peptide (RNase 1, Human) |
| 782 | Nucleic Acid | S-peptide-linker-ERT2 (RNase 1, Human) |
| 783 | Nucleic Acid | S-protein (RNase 1B, P. nemaeus) |
| 784 | Nucleic Acid | S-peptide (RNase 1B, P. nemoeus) |
| 785 | Nucleic Acid | S-peptide-linker-ERT2 (RNase 1B, P. nemaeus) |
| 786 | Nucleic Acid | S-protein (RNase A, Bovine) |
| 787 | Nucleic Acid | S-peptide (RNase A, Bovine) |
| 788 | Nucleic Acid | S-peptide-linker-ERT2 (RNase A, Bovine) |
| 789 | Nucleic Acid | 3x S-peptide (RNASE A) |
| 790 | Nucleic Acid | Linker sequence 1 |
| 791 | Nucleic Acid | Linker sequence 2 |
| 792 | Nucleic Acid | Linker sequence 3 |
| 793 | Nucleic Acid | 3xFlag |
| 794 | Nucleic Acid | Ty1 NLS |
| 795 | Nucleic Acid | eraseR (3xFLAG-Ty1NLS-PspCas13b) |
| 796 | Nucleic Acid | CRISPRase - 3xFLAG-Ty1NLS-dPspCas13b-linker-RNase |
| 797 | Nucleic Acid | short CRISPRase - 3xFLAG-Ty1NLS-dPspCas13b-linker-RNase |
| 798 | Nucleic Acid | PspCas13b CAG crRNA target sequences |
| 799 | Nucleic Acid | PspCas13b CAG-f2 crRNA target sequences |
| 800 | Nucleic Acid | PspCas13b CAG-f3 crRNA target sequences |
| 801 | Nucleic Acid | PspCas13b LUC crRNA target sequences |
| 802 | Amino Acid | Nuclear Export Signal (NES) 1 |
| 803 | Nucleic Acid | Nuclear Export Signal (NES) 1 |
| 804 | Amino Acid | NES 2 |
| 805 | Nucleic Acid | NES 2 |
| 806 | Amino Acid | N-terminal 1x Mitochondrial Targeting Sequence |
| 807 | Amino Acid | N-terminal 4x Mitochondrial Targeting Sequence |
| 808 | Amino Acid | N-terminal Secretory Signal Sequence (IL-2) |
| 809 | Amino Acid | N-terminal Myristoylation (Membrane Targeting Sequence) |
| 810 | Amino Acid | ER Localization - N-terminal Calsequestrin leader sequence |
| 811 | Amino Acid | ER Localization - C-terminal KDEL retention signal |
| 812 | Amino Acid | C-terminal Peroxisome Targeting Sequence |
| 813 | Nucleic Acid | N-terminal 1x Mitochondrial Targeting Sequence |
| 814 | Nucleic Acid | N-terminal 4x Mitochondrial Targeting Sequence |
| 815 | Nucleic Acid | N-terminal Secretory Signal Sequence (IL-2) |
| 816 | Nucleic Acid | N-terminal Myristoylation (Membrane Targeting Sequence) |
| 817 | Nucleic Acid | ER Localization - N-terminal Calsequestrin leader sequence |
| 818 | Nucleic Acid | ER Localization - C-terminal KDEL retention signal |
| 819 | Nucleic Acid | C-terminal Peroxisome Targeting Sequence |
| 820 | Nucleic Acid | EEF1A2 (EF1A2) promoter −493 to +1261 |
| 821 | Nucleic Acid | EEF1A2 (EF1A2) promoter −493 to +23 |
| 822 | Nucleic Acid | minimal EEF1A2 ((EF1A2) core promoter −221 to +23 |
| 823 | Nucleic Acid | mini-dCas13X.1 |
| 824 | Nucleic Acid | 3xFLAG-Ty1NLS-mini-dCas13X.1-linker-RNase |
| 825 | Nucleic Acid | RNase-linker-3xFLAG-Ty1NLS-mini-dCas13X.1-linker-RNase |
| 826 | Amino Acid | mini-dCas13X.1 |
| 827 | Amino Acid | 3xFLAG-Ty1NLS-mini-dCas13X.1-linker-RNase |
| 828 | Amino Acid | RNase-linker-3xFLAG-Ty1NLS-mini-dCas13X.1-linker-RNase |

### EXPERIMENTAL EXAMPLES

[0295] The invention is further described in detail by reference to the following experimental examples. These examples are provided for purposes of illustration only and are not intended to be limiting unless otherwise specified. Thus, the invention should in no way be construed as being limited to the following examples, but rather, should be construed to encompass any and all variations which become evident as a result of the teaching provided herein.

[0296] Without further description, it is believed that one of ordinary skill in the art can, using the preceding description and the following illustrative examples, make and utilize the present invention and practice the claimed methods. The following working examples therefore, specifically point out certain embodiments of the present invention, and are not to be construed as limiting in any way the remainder of the disclosure.

### Example 1: CRISPRase: Targeted RNA Cleavage with dCas13-RNase Fusion Proteins

[0297] The data presented herein demonstrates the fusion of dCas13 to heterologous RNases for targeted catalytic activity. Remarkably, these data demonstrate that fusion of dCas13 to RNases allows for targeted RNA cleavage. These dCas13-RNase fusion enzymes are termed CRISPRases (FIG. 1B). Since RNase enzymes comprise a large family with diverse substrate and nucleotide specificities, fusions to dCas13 has the potential to allow for new targeted RNA cleavage modalities for both basic research and therapeutic applications.

[0298] In general, endoribonucleases are ribonucleases which are capable of cleaving a phosphodiester bond within a polynucleotide chain. RNases are found in all kingdoms of life, as well as infectious viruses, and catalyze diverse biological processes. One remarkable aspect of RNases are their ability to recognize diverse nucleotide substrates, with some specific for single-stranded RNA (ssRNA) (ex. RNase 1b), ssRNA and double-stranded RNA (dsRNA) (ex. RNASE1), dsRNA-specific (ex. RNase III), or specific for RNA in a hybrid RNA:DNA complex (ex. RNase HI). Further, many RNases show sequence specific cleavage, for example, RNase A cleave preferentially at the 3′ end of C and U nucleotides, RNase T1 cleaves at the 3′ end of unpaired G residues, RNase U2 cleaves at the 3′ end of unpaired A residues, etc.

[0299] RNases and their catalytic domains are typically small (˜125 amino acids), with some functioning as monomers (RNase T1), and others as homodimers, which allow for binding and cleavage of both strands within dsRNA (RNase1 and RNase III domains). While a few RNase enzymes have been identified which serve intracellular functions (, ex. RNASE2 in the lysosome), most vertebrate RNases encode an N-terminal signal peptide which allows for their extracellular secretion and activity. RNases from the pancreatic RNase family ptRNase, which are among the most well-studied, are secreted and play an important role in RNA digestion.

[0300] To determine whether fusion of an RNases to dCas13 would result in targeted RNA cleavage, RNase enzymes with diverse RNA substrate and nucleotide specificities were cloned as fusions to the C-terminal end of dPspCas13b, separated by a long linker sequence. Fusion proteins were co-expressed in mammalian COST cells together with a Luciferase reporter and guide-RNAs targeting either the luciferase coding sequence (Luc crRNA), or with a negative control non-targeting guide-RNA (NC crRNA). Remarkably, many CRISPRases showed specific knockdown of luciferase activity in mammalian cells when targeted with a Luciferase guide-RNA, relative to expression with the non-targeting guide RNA (FIG. 1C). However, some CRISPRases showed little to no activity, which may be due in part to substrate or sequence requirements of the RNases, necessity to homodimerize, requirements for cofactors, such as metal ions or other enzymatic conditions, for example pH, or improper folding. In this regard, among the most potent CRISPRase enzymes at this target site included the fusion to RNase T1, which functions as a monomer and does not require metal ions for activity. Whereas those with little activity were ones predicted to cleave dsRNA substrates and encoded RNase III domains (miniR3 and tdDICER). These data demonstrate that dCas13 fusions to a heterologous RNase enzyme allows for targeted RNA cleavage of an mRNA reporter in mammalian cells. Modifications to both guide RNA and/or CRISPRase fusions proteins may further allow for additional unique RNA cleavage capabilities.

[0301] While CRISPR-Cas13 systems show ssRNA specific cleavage, dCas13 fusions to RNases with different substrate specificities may impart their substrate cleavage capabilities. For example, CRISPRases with different substrate cleavage specificities may be generated by fusions to RNases with ssRNA specificity, one with both ssRNA and dsRNA specificity, or dsRNA specificity (FIG. 2A-C). Here, forced tandem dimerization of RNase domains which require dimerization for function may enhance cleavage or promote dsRNA cleavage over ssRNA cleavage. Further, fusion of RNase domains to either N or C-terminal, or both may allow for cleavage at either 5′, 3′ or both 5′ and 3′ locations relative to the guide-RNA target site (FIGS. 2D and E).

[0302] In conjunction with different dCas13-RNase fusion proteins, modifications to the complementary CRISPR guide-RNA may allow for specific RNA substrate cleavage. For example, in FIG. 3A, guide-RNA extensions may block cleavage by ssRNA-specific RNases, or guide-RNAs with an unpaired bulge may allow for precise nucleotide specific substrate cleavage. In contrast, elongated guide-RNAs may enable cleavage by dsRNA-specific RNases, or flanking unpaired bulges could serve to focus dsRNA cleavage (FIG. 3B). Further, fusion of dCas13 with an RNase specific to cleaving RNA within a hybrid DNA:RNA complex may be enabled by delivery of a complementary DNA oligonucleotide (FIG. 3C).

[0303] Pancreatic RNases are among the most robust protein structures known, which are well known to survive harsh physiological conditions, including autoclaving. This feature is due in part to the strong interaction between structural residues. Remarkably, RNase1 members of this family are capable of being cleaved into two separate parts (S-peptide and S-protein), which when delivered in trans, regain catalytic activity. Harnessing this strong interaction may allow for inducible RNase catalytic activity, whereby S-protein fused to dCas13, inactive at a target RNA site, can be reactivated by delivery of S-peptide, either alone, or if fused to small-molecule responsive element, such as the tamoxifen (tmx) inducible ERT2 domain (FIG. 4).

[0304] To determine the effects of host gene expression by expression of expanded repeats, a luciferase reporter encoding either 12 or 960 CUG repeats was generated (FIG. 5A). The addition of 960 CUG repeats resulted in significant knockdown of luciferase activity, likely due to sequestration of the reporter RNA within nuclear foci (FIG. 5B). These findings are consistent with the observed decrease in DMPK expression in DM1 patients, despite normal levels of DMPK mRNA. As previously reporter, Cas13 targeted to CUG repeats with a complimentary CAG crRNA resulted in robust decrease in nuclear foci. However, Cas13 also results in decreased luciferase activity, a finding consistent with complete degradation of targeted mRNAs by CRISPR-Cas13 (FIG. 5C-E). Targeting of CRISPRases to repeat foci also resulted in decreased number of foci, however, surprisingly, also resulted in increased luciferase reporter activity (FIGS. 5C and D). These findings are consistent with a model by which CRISPRases induce single site RNA cleavage events, or when targeted to expansion repeats, are capable of cleaving repeat RNA sequences but spare the remainder of the RNA (FIG. 5F). Thus, targeting expansion repeat RNAs with CRISPRases may provide a mechanism for both the elimination of toxic RNA foci and rescue of host gene expression.

### Example 2: Use of CRISPRases for Trans Splicing and Assembly of RNA in Cells and In Vitro

[0305] RNAse-mediated RNA cleavage generates 2′,3′ cyclic phosphate and 5′ hydroxyl RNA termini, which mimic those found upon cleavage by autocatalytic RNA sequences, such as ribozymes (Shigematsu M, et al., Front Genet, 2018, 9:562). Based on previous work, it was found that ribozyme-mediated RNA cleavage results in trans-RNA splicing in cells, or in vitro catalyzed by RtcB ligase. Thus, RNAse-cleaved RNAs may also be subject to trans-splicing in cells or in vitro by RtcB. When fused to a sequence specific RNA targeting protein, such as the CRISPRases described herein, targeting of two or more locations may provide a means for trans-splicing of two distinct RNA sequences, or to delete/bypass deleterious sequences within a single RNA sequence (FIG. 6A-C). Targeting of multiple sites could be performed using multiple guide RNAs with an N- or C-terminal RNAse fusion (FIG. 6A-B), or through fusion of multiple RNAses to a single RNA targeting protein (FIG. 6C). Due to the small size of many RNAse sequences, as well the discovery of compact Cas13 orthologs (Xu C, et al., Nat Methods, 2021, 18(5): 499-506), CRISPRases are well within the packaging capacity of many therapeutic viral vectors, notably AAV.

[0306] The disclosures of each and every patent, patent application, and publication cited herein are hereby incorporated herein by reference in their entirety. While this invention has been disclosed with reference to specific embodiments, it is apparent that other embodiments and variations of this invention may be devised by others skilled in the art without departing from the true spirit and scope of the invention. The appended claims are intended to be construed to include all such embodiments and equivalent variations.

The application's sequence listing, which the Patent Office published only in electronic form, follows.

SEQUENCE LISTING (828 sequences)

SEQ ID NO: 1 - protein, 1089 aa, Artificial Sequence
  Chemically Synthesized
NIPALVENQKKYFGTYSVMAMLNAQTVLDHIQKVADIEGEQNENNENLWFHPVMSHLYNAKNGYDKQPEKTMFIIERLQSYFPFLKIMAENQREYSNGKYKQNRVEVNSNDIFEVLKRAFGVLKMYRDLTNHYKTYEEKLNDGCEFLTSTEQPLSGMINNYYTVALRNMNERYGYKTEDLAFIQDKRFKFVKDAYGKKKSQVNTGFFLSLQDYNGDTQKKLHLSGVGIALLICLFLDKQYINIFLSRLPIFSSYNAQSEERRIIIRSFGINSIKLPKDRIHSEKSNKSVAMDMLNEVKRCPDELFTTLSAEKQSRFRIISDDHNEVLMKRSSDRFVPLLLQYIDYGKLFDHIRFHVNMGKLRYLLKADKTCIDGQTRVRVIEQPLNGFGRLEEAETMRKQENGTFGNSGIRIRDFENMKRDDANPANYPYIVDTYTHYILENNKVEMFINDKEDSAPLLPVIEDDRYVVKTIPSCRMSTLEIPAMAFHMFLFGSKKTEKLIVDVHNRYKRLFQAMQKEEVTAENIASFGIAESDLPQKILDLISGNAHGKDVDAFIRLTVDDMLTDTERRIKRFKDDRKSIRSADNKMGKRGFKQISTGKLADFLAKDIVLFQPSVNDGENKITGLNYRIMQSAIAVYDSGDDYEAKQQFKLMFEKARLIGKGTTEPHPFLYKVFARSIPANAVEFYERYLIERKFYLTGLSNEIKKGNRVDVPFIRRDQNKWKTPAMKTLGRIYSEDLPVELPRQMFDNEIKSHLKSLPQMEGIDFNNANVTYLIAEYMKRVLDDDFQTFYQWNRNYRYMDMLKGEYDRKGSLQHCFTSVEEREGLWKERASRTERYRKQASNKIRSNRQMRNASSEEIETILDKRLSNSRNEYQKSEKVIRRYRVQDALLFLLAKKTLTELADFDGERFKLKEIMPDAEKGILSEIMPMSFTFEKGGKKYTITSEGMKLKNYGDFFVLASDKRIGNLLELVGSDIVSKEDIMEEFNKYDQCRPEISSIVFNLEKWAFDTYPELSARVDREEKVDFKSILKILLNNKNINKEQSDILRKIRNAFDHNNYPDKGVVEIKALPEIAMSIKKAFGEYAIMK

SEQ ID NO: 2 - protein, 982 aa, Artificial Sequence
  Chemically Synthesized
NIPALVENQKKYFGTYSVMAMLNAQTVLDHIQKVADIEGEQNENNENLWFHPVMSHLYNAKNGYDKQPEKTMFIIERLQSYFPFLKIMAENQREYSNGKYKQNRVEVNSNDIFEVLKRAFGVLKMYRDLTNHYKTYEEKLNDGCEFLTSTEQPLSGMINNYYTVALRNMNERYGYKTEDLAFIQDKRFKFVKDAYGKKKSQVNTGFFLSLQDYNGDTQKKLHLSGVGIALLICLFLDKQYINIFLSRLPIFSSYNAQSEERRIIIRSFGINSIKLPKDRIHSEKSNKSVAMDMLNEVKRCPDELFTTLSAEKQSRFRIISDDHNEVLMKRSSDRFVPLLLQYIDYGKLFDHIRFHVNMGKLRYLLKADKTCIDGQTRVRVIEQPLNGFGRLEEAETMRKQENGTFGNSGIRIRDFENMKRDDANPANYPYIVDTYTHYILENNKVEMFINDKEDSAPLLPVIEDDRYVVKTIPSCRMSTLEIPAMAFHMFLFGSKKTEKLIVDVHNRYKRLFQAMQKEEVTAENIASFGIAESDLPQKILDLISGNAHGKDVDAFIRLTVDDMLTDTERRIKRFKDDRKSIRSADNKMGKRGFKQISTGKLADFLAKDIVLFQPSVNDGENKITGLNYRIMQSAIAVYDSGDDYEAKQQFKLMFEKARLIGKGTTEPHPFLYKVFARSIPANAVEFYERYLIERKFYLTGLSNEIKKGNRVDVPFIRRDQNKWKTPAMKTLGRIYSEDLPVELPRQMFDNEIKSHLKSLPQMEGIDFNNANVTYLIAEYMKRVLDDDFQTFYQWNRNYRYMDMLKGEYDRKGSLQHCFTSVEEREGLWKERASRTERYRKQASNKIRSNRQMRNASSEEIETILDKRLSNSRNEYQKSEKVIRRYRVQDALLFLLAKKTLTELADFDGERFKLKEIMPDAEKGILSEIMPMSFTFEKGGKKYTITSEGMKLKNYGDFFVLASDKRIGNLLELVGSDIVSKED

SEQ ID NO: 3 - protein, 953 aa, Artificial Sequence
  Chemically Synthesized
MSNEIGAFREHQFAYAPGNEKQEEATFATYFNLALSNVEGMMFGEVESNPDKIEKSLDTLPPAILRQIASFIWLSKEDHPDKAYSTEEVKVIVTDLVRRLCFYRNYFSHCFYLDTQYFYSDELVDTTAIGEKLPYNFHHFITNRLFRYSLPEITLFRWNEGERKYEILRDGLIFFCCLFLKRGQAERFLNELRFFKRTDEEGRIKRTIFTKYCTRESHKHIGIEEQDFLIFQDIIGDLNRVPKVCDGVVDLSKENERYIKNRETSNESDENKARYRLLIREKDKFPYYLMRYIVDFGVLPCITFKQNDYSTKEGRGQFHYQDAAVAQEERCYNFVVRNGNVYYSYMPQAQNVVRISELQGTISVEELRNMVYASINGKDVNKSVEQYLYHLHLLYEKILTISGQTIKEGRVDVEDYRPLLDKLLLRPASNGEELRRELRKLLPKRVCDLLSNRFDCSEGVSAVEKRLKAILLRHEQLLLSQNPALHIDKIKSVIDYLYLFFSDDEKFRQQPTEKAHRGLKDEEFQMYHYLVGDYDSHPLALWKELEASGRLKPEMRKLTSATSLHGLYMLCLKGTVEWCRKQLMSIGKGTAKVEAIADRVGLKLYDKLKEYTPEQLEREVKLVVMHGYAAAATPKPKAQAAIPSKLTELRFYSFLGKREMSFAAFIRQDKKAQKLWLRNFYTVENIKTLQKRQAAADAACKKLYNLVGEVERVHTNDKVLVLVAQRYRERLLNVGSKCAVTLDNPERQQKLADVYEVQNAWLSIRFDDLDFTLTHVNLSNLRKAYNLIPRKHILAFKEYLDNRVKQKLCEECRNVRRKEDLCTCCSPRYSNLTSWLKENHSESSIEREAATMMLLDVERKLLSFLLDERRKAIIEYGKFIPFSALVKECRLADAGLCGIRNDVLHDNVISYADAIGKLSAYFPKEASEAVEYIRRTKEVREQRREELMANSSQ

SEQ ID NO: 4 - protein, 1111 aa, Artificial Sequence
  Chemically Synthesized
MKSGRREKAKSNKSSIVRVIISNFDDKQVKEIKVLYTKQGGIDVIKFKSTEKDEKGRMKFNFDCAYNRLEEEEFNSFGGKGKQSFFVTTNEDLTELHVTKRHKTTGEIIKDYTIQGKYTPIKQDRTKVTVSITDNKDHFDSNDLGDKIRLSRSLTQYTNRILLDADVMKNYREIVCSDSEKVDETINIDSQEIYKINRFLSYRSNMIIYYQMINNFLLHYDGEEDKGGNDSINLINEIWKYENKKNDEKEKIIERSYKSIEKSINQYILNHNTEVESGDKEKKIDISEERIKEDLKKTFILFSRLRHYMVHYNYKFYENLYSGKNFIIYNKDKSKSRRFSELLDLNIFKELSKIKLVKNRAVSNYLDKKTTIHVLNKNINAIKLLDIYRDICETKNGFNNFINNMMTISGEEDKEYKEMVTKHFNENMNKLSIYLENFKKHSDFKTNNKKKETYNLLKQELDEQKKLRLWFNAPYVYDIHSSKKYKELYVERKKYVDIHSKLIEAGINNDNKKKLNEINVKLCELNTEMKEMTKLNSKYRLQYKLQLAFGFILEEFNLDIDKFVSAFDKDNNLTISKFMEKRETYLSKSLDRRDNRFKKLIKDYKFRDTEDIFCSDRENNLVKLYILMYILLPVEIRGDFLGFVKKNYYDLKHVDFIDKRNNDNKDTFFHDLRLFEKNVKRLEVTSYSLSDGFLGKKSREKFGKELEKFIYKNVSIALPTNIDIKEFNKSLVLPMMKNYQIIFKLLNDIEISALFLIAKKEGNEGSITFKKVIDKVRKEDMNGNINFSQVMKMALNEKVNCQIRNSIAHINMKQLYIEPLNIYINNNQNKKTISEQMEEIIDICITKGLTGKELNKNIINDYYMKKEKLVFNLKLRKRNNLVSIDAQQKNMKEKSILNKYDLNYKDENLNIKEIILKVNDLNNKQKLLKETTEGESNYKNALSKDILLLNGIIRKNINFKIKEMILGIIQQNEYRYVNINIYDKIRKEDHNIDLKINNKYIEISCYENKSNESTDERINFKIKYMDLKVKNELLVPSCYEDIYIKKKIDLEIRYIENCKVVYIDIYYKKYNINLEFDGKTLFVKFNKDVKKNNQKVNLESNYIQNIKFIVS

SEQ ID NO: 5 - protein, 1276 aa, Artificial Sequence
  Chemically Synthesized
MKISKVDHVKSGIDQKLSSQRGMLYKQPQKKYEGKQLEEHVRNLSRKAKALYQVFPVSGNSKMEKELQIINSFIKNILLRLDSGKTSEEIVGYINTYSVASQISGDHIQELVDQHLKESLRKYTCVGDKRIYVPDIIVALLKSKFNSETLQYDNSELKILIDFIREDYLKEKQIKQIVHSIENNSTPLRIAEINGQKRLIPANVDNPKKSYIFEFLKEYAQSDPKGQESLLQHMRYLILLYLYGPDKITDDYCEEIEAWNFGSIVMDNEQLFSEEASMLIQDRIYVNQQIEEGRQSKDTAKVKKNKSKYRMLGDKIEHSINESVVKHYQEACKAVEEKDIPWIKYISDHVMSVYSSKNRVDLDKLSLPYLAKNTWNTWISFIAMKYVDMGKGVYHFAMSDVDKVGKQDNLIIGQIDPKFSDGISSFDYERIKAEDDLHRSMSGYIAFAVNNFARAICSDEFRKKNRKEDVLTVGLDEIPLYDNVKRKLLQYFGGASNWDDSIIDIIDDKDLVACIKENLYVARNVNFHFAGSEKVQKKQDDILEEIVRKETRDIGKHYRKVFYSNNVAVFYCDEDIIKLMNHLYQREKPYQAQIPSYNKVISKTYLPDLIFMLLKGKNRTKISDPSIMNMFRGTFYFLLKEIYYNDFLQASNLKEMFCEGLKNNVKNKKSEKPYQNFMRRFEELENMGMDFGEICQQIMTDYEQQNKQKKKTATAVMSEKDKKIRTLDNDTQKYKHFRTLLYIGLREAFIIYLKDEKNKEWYEFLREPVKREQPEEKEFVNKWKLNQYSDCSELILKDSLAAAWYVVAHFINQAQLNHLIGDIKNYIQFISDIDRRAKSTGNPVSESTEIQIERYRKILRVLEFAKFFCGQITNVLTDYYQDENDFSTHVGHYVKFEKKNMEPAHALQAFSNSLYACGKEKKKAGFYYDGMNPIVNRNITLASMYGNKKLLENAMNPVTEQDIRKYYSLMAELDSVLKNGAVCKSEDEQKNLRHFQNLKNRIELVDVLTLSELVNDLVAQLIGWVYIRERDMMYLQLGLHYIKLYFTDSVAEDSYLRTLDLEEGSIADGAVLYQIASLYSFNLPMYVKPNKSSVYCKKHVNSVATKFDIFEKEYCNGDETVIENGLRLFENINLHKDMVKFRDYLAHFKYFAKLDESILELYSKAYDFFFSYNIKLKKSVSYVLTNVLLSYFINAKLSFSTYKSSGNKTVQHRTTKISVVAQTDYFTYKLRSIVKNKNGVESIENDDRRCEVVNIAARDKEFVDEVCNVINYNSDK

SEQ ID NO: 6 - protein, 1224 aa, Artificial Sequence
  Chemically Synthesized
MENKTSLGNNIYYNPFKPQDKSYFAGYFNAAMENTDSVFRELGKRLKGKEYTSENFFDAIFKENISLVEYERYVKLLSDYFPMARLLDKKEVPIKERKENFKKNFKGIIKAVRDLRNFYTHKEHGEVEITDEIFGVLDEMLKSTVLTVKKKKVKTDKTKEILKKSIEKQLDILCQKKLEYLRDTARKIEEKRRNQRERGEKELVAPFKYSDKRDDLIAAIYNDAFDVYIDKKKDSLKESSKAKYNTKSDPQQEEGDLKIPISKNGVVFLLSLFLTKQEIHAFKSKIAGFKATVIDEATVSEATVSHGKNSICFMATHEIFSHLAYKKLKRKVRTAEINYGEAENAEQLSVYAKETLMMQMLDELSKVPDVVYQNLSEDVQKTFIEDWNEYLKENNGDVGTMEEEQVIHPVIRKRYEDKFNYFAIRFLDEFAQFPTLRFQVHLGNYLHDSRPKENLISDRRIKEKITVFGRLSELEHKKALFIKNTETNEDREHYWEIFPNPNYDFPKENISVNDKDFPIAGSILDREKQPVAGKIGIKVKLLNQQYVSEVDKAVKAHQLKQRKASKPSIQNIIEEIVPINESNPKEAIVFGGQPTAYLSMNDIHSILYEFFDKWEKKKEKLEKKGEKELRKEIGKELEKKIVGKIQAQIQQIIDKDTNAKILKPYQDGNSTAIDKEKLIKDLKQEQNILQKLKDEQTVREKEYNDFIAYQDKNREINKVRDRNHKQYLKDNLKRKYPEAPARKEVLYYREKGKVAVWLANDIKRFMPTDFKNEWKGEQHSLLQKSLAYYEQCKEELKNLLPEKVFQHLPFKLGGYFQQKYLYQFYTCYLDKRLEYISGLVQQAENFKSENKVFKKVENECFKFLKKQNYTHKELDARVQSILGYPIFLERGFMDEKPTIIKGKTFKGNEALFADWFRYYKEYQNFQTFYDTENYPLVELEKKQADRKRKTKIYQQKKNDVFTLLMAKHIFKSVFKQDSIDQFSLEDLYQSREERLGNQERARQTGERNTNYIWNKTVDLKLCDGKITVENVKLKNVGDFIKYEYDQRVQAFLKYEENIEWQAFLIKESKEEENYPYVVEREIEQYEKVRREELLKEVHLIEEYILEKVKDKEILKKGDNQNFKYYILNGLLKQLKNEDVESYKVFNLNTEPEDVNINQLKQEATDLEQKAFVLTYIRNKFAHNQLPKKEFWDYCQEKYGKIEKEKTYAEYFAEVFKKEKEALIK

SEQ ID NO: 7 - protein, 1385 aa, Artificial Sequence
  Chemically Synthesized
MKFSKVDHTRSAVGIQKATDSVHGMLYTDPKKQEVNDLDKRFDQLNVKAKRLYNVFNQSKAEEDDDEKRFGKVVKKLNRELKDLLFHREVSRYNSIGNAKYNYYGIKSNPEEIVSNLGMVESLKGERDPQKVISKLLLYYLRKGLKPGTDGLRMILEASCGLRKLSGDEKELKVFLQTLDEDFEKKTFKKNLIRSIENQNMAVQPSNEGDPIIGITQGRFNSQKNEEKSAIERMMSMYADLNEDHREDVLRKLRRLNVLYFNVDTEKTEEPTLPGEVDTNPVFEVWHDHEKGKENDRQFATFAKILTEDRETRKKEKLAVKEALNDLKSAIRDHNIMAYRCSIKVTEQDKDGLFFEDQRINRFWIHHIESAVERILASINPEKLYKLRIGYLGEKVWKDLLNYLSIKYIAVGKAVFHFAMEDLGKTGQDIELGKLSNSVSGGLTSFDYEQIRADETLQRQLSVEVAFAANNLFRAVVGQTGKKIEQSKSEENEEDFLLWKAEKIAESIKKEGEGNTLKSILQFFGGASSWDLNHFCAAYGNESSALGYETKFADDLRKAIYSLRNETFHFTTLNKGSFDWNAKLIGDMFSHEAATGIAVERTRFYSNNLPMFYRESDLKRIMDHLYNTYHPRASQVPSFNSVFVRKNFRLFLSNTLNTNTSFDTEVYQKWESGVYYLFKEIYYNSFLPSGDAHHLFFEGLRRIRKEADNLPIVGKEAKKRNAVQDFGRRCDELKNLSLSAICQMIMTEYNEQNNGNRKVKSTREDKRKPDIFQHYKMLLLRTLQEAFAIYIRREEFKFIFDLPKTLYVMKPVEEFLPNWKSGMFDSLVERVKQSPDLQRWYVLCKFLNGRLLNQLSGVIRSYIQFAGDIQRRAKANHNRLYMDNTQRVEYYSNVLEVVDFCIKGTSRFSNVFSDYFRDEDAYADYLDNYLQFKDEKIAEVSSFAALKTFCNEEEVKAGIYMDGENPVMQRNIVMAKLFGPDEVLKNVVPKVTREEIEEYYQLEKQIAPYRQNGYCKSEEDQKKLLRFQRIKNRVEFQTITEFSEIINELLGQLISWSFLRERDLLYFQLGFHYLCLHNDTEKPAEYKEISREDGTVIRNAILHQVAAMYVGGLPVYTLADKKLAAFEKGEADCKLSISKDTAGAGKKIKDFFRYSKYVLIKDRMLTDQNQKYTIYLAGLELFENTDEHDNITDVRKYVDHFKYYATSDENAMSILDLYSEIHDRFFTYDMKYQKNVANMLENILLRHFVLIRPEFFTGSKKVGEGKKITCKARAQIEIAENGMRSEDFTYKLSDGKKNISTCMIAARDQKYLNTVARLLYYPHEAKKSIVDTREKKNNKKTNRGDGTFNKQKGTARKEKDNGPREFNDTGFSNTPFAGFDPFRNS

SEQ ID NO: 8 - protein, 1199 aa, Artificial Sequence
  Chemically Synthesized
MKNIQRLGKGNEFSPFKKEDKFYFGGFLNLANNNIEDFFKEIITRFGIVITDENKKPKETFGEKILNEIFKKDISIVDYEKWVNIFADYFPFTKYLSLYLEEMQFKNRVICFRDVMKELLKTVEALRNFYTHYDHEPIKIEDRVFYFLDKVLLDVSLTVKNKYLKTDKTKEFLNQHIGEELKELCKQRKDYLVGKGKRIDKESEIINGIYNNAFKDFICKREKQDDKENHNSVEKILCNKEPQNKKQKSSATVWELCSKSSSKYTEKSFPNRENDKHCLEVPISQKGIVFLLSFFLNKGEIYALTSNIKGFKAKITKEEPVTYDKNSIRYMATHRMFSFLAYKGLKRKIRTSEINYNEDGQASSTYEKETLMLQMLDELNKVPDVVYQNLSEDVQKTFIEDWNEYLKENNGDVGTMEEEQVIHPVIRKRYEDKFNYFAIRFLDEFAQFPTLRFQVHLGNYLCDKRTKQICDTTTEREVKKKITVFGRLSELENKKAIFLNEREEIKGWEVFPNPSYDFPKENISVNYKDFPIVGSILDREKQPVSNKIGIRVKIADELQREIDKAIKEKKLRNPKNRKANQDEKQKERLVNEIVSTNSNEQGEPVVFIGQPTAYLSMNDIHSVLYEFLINKISGEALETKIVEKIETQIKQIIGKDATTKILKPYTNANSNSINREKLLRDLEQEQQILKTLLEEQQQREKDKKDKKSKRKHELYPSEKGKVAVWLANDIKRFMPKAFKEQWRGYHHSLLQKYLAYYEQSKEELKNLLPKEVFKHFPFKLKGYFQQQYLNQFYTDYLKRRLSYVNELLLNIQNFKNDKDALKATEKECFKFFRKQNYIINPINIQIQSILVYPIFLKRGFLDEKPTMIDREKFKENKDTELADWFMHYKNYKEDNYQKFYAYPLEKVEEKEKFKRNKQINKQKKNDVYTLMMVEYIIQKIFGDKFVEENPLVLKGIFQSKAERQQNNTHAATTQERNLNGILNQPKDIKIQGKITVKGVKLKDIGNFRKYEIDQRVNTFLDYEPRKEWMAYLPNDWKEKEKQGQLPPNNVIDRQISKYETVRSKILLKDVQELEKIISDEIKEEHRHDLKQGKYYNFKYYILNGLLRQLKNENVENYKVFKLNTNPEKVNITQLKQEATDLEQKAFVLTYIRNKFAHNQLPKKEFWDYCQEKYGKIEKEKTYAEYFAEVFKREKEALIK

SEQ ID NO: 9 - protein, 1164 aa, Artificial Sequence
  Chemically Synthesized
MRMTKVKINGSPVSMNRSKLNGHLVWNGTTNTVNILTKKEQSFAASFLNKTLVKADQVKGYKVLAENIFIIFEQLEKSNSEKPSVYLNNIRRLKEAGLKRFFKSKYHEEIKYTSEKNQSVPTKLNLIPLFFNAVDRIQEDKFDEKNWSYFCKEMSPYLDYKKSYLNRKKEILANSIQQNRGFSMPTAEEPNLLSKRKQLFQQWAMKFQESPLIQQNNFAVEQFNKEFANKINELAAVYNVDELCTAITEKLMNFDKDKSNKTRNFEIKKLWKQHPHNKDKALIKLFNQEGNEALNQFNIELGKYFEHYFPKTGKKESAESYYLNPQTIIKTVGYQLRNAFVQYLLQVGKLHQYNKGVLDSQTLQEIGMYEGFQTKFMDACVFASSSLRNIIQATTNEDILTREKFKKELEKNVELKHDLFFKTEIVEERDENPAKKIAMTPNELDLWAIRGAVQRVRNQIFHQQINKRHEPNQLKVGSFENGDLGNVSYQKTIYQKLFDAEIKDIEIYFAEKIKSSGALEQYSMKDLEKLFSNKELTLSLGGQVVAFAPSYKKLYKQGYFYQNEKTIELEQFTDYDFSNDVFKANYYLIKLIYHYVFLPQFSQANNKLFKDTVHYVIQQNKELNTTEKDKKNNKKIRKYAFEQVKLMKNESPEKYMQYLQREMQEERTIKEAKKTNEEKPNYNFEKLLIQIFIKGFDTFLRNFDLNLNPAEELVGTVKEKAEGLRKRKERIAKILNVDEQIKTGDEEIAFWIFAKLLDARHLSELRNEMIKFKQSSVKKGLIKNGDLIEQMQPILELCILSNDSESMEKESFDKIEVFLEKVELAKNEPYMQEDKLTPVKFRFMKQLEKYQTRNFIENLVIENPEFKVSEKIVLNWHEEKEKIADLVDKRTKLHEEWASKAREIEEYNEKIKKNKSKKLDKPAEFAKFAEYKIICEAIENFNRLDHKVRLTYLKNLHYLMIDLMGRMVGFSVLFERDFVYMGRSYSALKKQSIYLNDYDTFANIRDWEVNENKHLFGTSSSDLTFQETAEFKNLKKPMENQLKALLGVTNHSFEIRNNIAHLHVLRNDGKGEGVSLLSCMNDLRKLMSYDRKLKNAVTKAIIKILDKHGMILKLTNNDHTKPFEIESLKPKKIIHLEKSNHSFPMDQVSQEYCDLVKKMLVFTN

SEQ ID NO: 10 - protein, 1175 aa, Artificial Sequence
  Chemically Synthesized
MRITKVKIKLDNKLYQVTMQKEEKYGTLKLNEESRKSTAEILRLKKASFNKSFHSKTINSQKENKNATIKKNGDYISQIFEKLVGVDTNKNIRKPKMSLTDLKDLPKKDLALFIKRKFKNDDIVEIKNLDLISLFYNALQKVPGEHFTDESWADFCQEMMPYREYKNKFIERKIILLANSIEQNKGFSINPETFSKRKRVLHQWAIEVQERGDFSILDEKLSKLAEIYNFKKMCKRVQDELNDLEKSMKKGKNPEKEKEAYKKQKNFKIKTIWKDYPYKTHIGLIEKIKENEELNQFNIEIGKYFEHYFPIKKERCTEDEPYYLNSETIATTVNYQLKNALISYLMQIGKYKQFGLENQVLDSKKLQEIGIYEGFQTKFMDACVFATSSLKNIIEPMRSGDILGKREFKEAIATSSFVNYHHFFPYFPFELKGMKDRESELIPFGEQTEAKQMQNIWALRGSVQQIRNEIFHSFDKNQKFNLPQLDKSNFEFDASENSTGKSQSYIETDYKFLFEAEKNQLEQFFIERIKSSGALEYYPLKSLEKLFAKKEMKFSLGSQVVAFAPSYKKLVKKGHSYQTATEGTANYLGLSYYNRYELKEESFQAQYYLLKLIYQYVFLPNFSQGNSPAFRETVKAILRINKDEARKKMKKNKKFLRKYAFEQVREMEFKETPDQYMSYLQSEMREEKVRKAEKNDKGFEKNITMNFEKLLMQIFVKGFDVFLTTFAGKELLLSSEEKVIKETEISLSKKINEREKTLKASIQVEHQLVATNSAISYWLFCKLLDSRHLNELRNEMIKFKQSRIKFNHTQHAELIQNLLPIVELTILSNDYDEKNDSQNVDVSAYFEDKSLYETAPYVQTDDRTRVSFRPILKLEKYHTKSLIEALLKDNPQFRVAATDIQEWMHKREEIGELVEKRKNLHTEWAEGQQTLGAEKREEYRDYCKKIDRFNWKANKVTLTYLSQLHYLITDLLGRMVGFSALFERDLVYFSRSFSELGGETYHISDYKNLSGVLRLNAEVKPIKIKNIKVIDNEENPYKGNEPEVKPFLDRLHAYLENVIGIKAVHGKIRNQTAHLSVLQLELSMIESMNNLRDLMAYDRKLKNAVTKSMIKILDKHGMILKLKIDENHKNFEIESLIPKEIIHLKDKAIKTNQVSEEYCQLVLALLTTNPGNQLN

SEQ ID NO: 11 - protein, 1373 aa, Artificial Sequence
  Chemically Synthesized
MKISKESHKRTAVAVMEDRVGGVVYVPGGSGIDLSNNLKKRSMDTKSLYNVFNQIQAGTAPSEYEWKDYLSEAENKKREAQKMIQKANYELRRECEDYAKKANLAVSRIIFSKKPKKIFSDDDIISHMKKQRLSKFKGRMEDFVLIALRKSLVVSTYNQEVFDSRKAATVFLKNIGKKNISADDERQIKQLMALIREDYDKWNPDKDSSDKKESSGTKVIRSIEHQNMVIQPEKNKLSLSKISNVGKKTKTKQKEKAGLDAFLKEYAQIDENSRMEYLKKLRRLLDTYFAAPSSYIKGAAVSLPENINFSSELNVWERHEAAKKVNINFVEIPESLLNAEQNNNKINKVEQEHSLEQLRTDIRRRNITCYHFANALAADERYHTLFFENMAMNQFWIHHMENAVERILKKCNVGTLFKLRIGYLSEKVWKDMLNLLSIKYIALGKAVYHFALDDIWKADIWKDASDKNSGKINDLTLKGISSFDYEMVKAQEDLQREMAVGVAFSTNNLARVTCKMDDLSDAESDFLLWNKEAIRRHVKYTEKGEILSAILQFFGGRSLWDESLFEKAYSDSNYELKFLDDLKRAIYAARNETFHFKTAAIDGGSWNTRLFGSLFEKEAGLCLNVEKNKFYSNNLVLFYKQEDLRVFLDKLYGKECSRAAQIPSYNTILPRKSFSDFMKQLLGLKEPVYGSAILDQWYSACYYLFKEVYYNLFLQDSSAKALFEKAVKALKGADKKQEKAVESFRKRYWEISKNASLAEICQSYITEYNQQNNKERKVRSANDGMFNEPIYQHYKMLLKEALKMAFASYIKNDKELKFVYKPTEKLFEVSQDNFLPNWNSEKYNTLISEVKNSPDLQKWYIVGKFMNARMLNLLLGSMRSYLQYVSDIQKRAAGLGENQLHLSAENVGQVKKWIQVLEVCLLLSVRISDKFTDYFKDEEEYASYLKEYVDFEDSAMPSDYSALLAFSNEGKIDLYVDASNPKVNRNIIQAKLYAPDMVLKKVVKKISQDECKEFNEKKEQIMQFKNKGDEVSWEEQQKILEYQKLKNRVELRDLSEYGELINELLGQLINWSYLRERDLLYFQLGFHYSCLMNESKKPDAYKTIRRGTVSIENAVLYQIIAMYINGFPVYAPEKGELKPQCKTGSAGQKIRAFCQWASMVEKKKYELYNAGLELFEVVKEHDNIIDLRNKIDHFKYYQGNDSILALYGEIFDRFFTYDMKYRNNVLNHLQNILLRHNVIIKPIISKDKKEVGRGKMKDRAAFLLEEVSSDRFTYKVKEGERKIDAKNRLYLETVRDILYFPNRAVNDKGEDVIICSKKAQDLNEKKADRDKNHDKSKDTNQKKEGKNQEEKSENKEPYSDRMTWKPFAGIKLE

SEQ ID NO: 12 - protein, 1344 aa, Artificial Sequence
  Chemically Synthesized
MLRRDKEVKKLYNVFNQIQVGTKPKKWNNDEKLSPEENERRAQQKNIKMKNYKWREACSKYVESSQRIINDVIFYSYRKAKNKLRYMRKNEDILKKMQEAEKLSKFSGGKLEDFVAYTLRKSLVVSKYDTQEFDSLAAMVVFLECIGKNNISDHEREIVCKLLELIRKDFSKLDPNVKGSQGANIVRSVRNQNMIVQPQGDRFLFPQVYAKENETVTNKNVEKEGLNEFLLNYANLDDEKRAESLRKLRRILDVYFSAPNHYEKDMDITLSDNIEKEKFNVWEKHECGKKETGLFVDIPDVLMEAEAENIKLDAVVEKRERKVLNDRVRKQNIICYRYTRAVVEKYNSNEPLFFENNAINQYWIHHIENAVERILKNCKAGKLFKLRKGYLAEKVWKDAINLISIKYIALGKAVYNFALDDIWKDKKNKELGIVDERIRNGITSFDYEMIKAHENLQRELAVDIAFSVNNLARAVCDMSNLGNKESDFLLWKRNDIADKLKNKDDMASVSAVLQFFGGKSSWDINIFKDAYKGKKKYNYEVRFIDDLRKAIYCARNENFHFKTALVNDEKWNTELFGKIFERETEFCLNVEKDRFYSNNLYMFYQVSELRNMLDHLYSRSVSRAAQVPSYNSVIVRTAFPEYITNVLGYQKPSYDADTLGKWYSACYYLLKEIYYNSFLQSDRALQLFEKSVKTLSWDDKKQQRAVDNFKDHFSDIKSACTSLAQVCQIYMTEYNQQNNQIKKVRSSNDSIFDQPVYQHYKVLLKKAIANAFADYLKNNKDLFGFIGKPFKANEIREIDKEQFLPDWTSRKYEALCIEVSGSQELQKWYIVGKFLNARSLNLMVGSMRSYIQYVTDIKRRAASIGNELHVSVHDVEKVEKWVQVIEVCSLLASRTSNQFEDYFNDKDDYARYLKSYVDFSNVDMPSEYSALVDFSNEEQSDLYVDPKNPKVNRNIVHSKLFAADHILRDIVEPVSKDNIEEFYSQKAEIAYCKIKGKEITAEEQKAVLKYQKLKNRVELRDIVEYGEIINELLGQLINWSFMRERDLLYFQLGFHYDCLRNDSKKPEGYKNIKVDENSIKDAILYQIIGMYVNGVTVYAPEKDGDKLKEQCVKGGVGVKVSAFHRYSKYLGLNEKTLYNAGLEIFEVVAEHEDIINLRNGIDHFKYYLGDYRSMLSIYSEVFDRFFTYDIKYQKNVLNLLQNILLRHNVIVEPILESGFKTIGEQTKPGAKLSIRSIKSDTFQYKVKGGTLITDAKDERYLETIRKILYYAENEEDNLKKSVVVTNADKYEKNKESDDQNKQKEKKNKDNKGKKNEETKSDAEKNNNERLSYNPFANLNFKLSN

SEQ ID NO: 13 - protein, 954 aa, Artificial Sequence
  Chemically Synthesized
MGKKIHARDLREQRKTDRTEKFADQNKKREAERAVPKKDAAVSVKSVSSVSSKKDNVTKSMAKAAGVKSVFAVGNTVYMTSFGRGNDAVLEQKIVDTSHEPLNIDDPAYQLNVVTMNGYSVTGHRGETVSAVTDNPLRRFNGRKKDEPEQSVPTDMLCLKPTLEKKFFGKEFDDNIHIQLIYNILDIEKILAVYSTNAIYALNNMSADENIENSDFFMKRTTDETFDDFEKKKESTNSREKADFDAFEKFIGNYRLAYFADAFYVNKKNPKGKAKNVLREDKELYSVLTLIGKLRHWCVHSEEGRAEFWLYKLDELKDDFKNVLDVVYNRPVEEINNRFIENNKVNIQILGSVYKNTDIAELVRSYYEFLITKKYKNMGFSIKKLRESMLEGKGYADKEYDSVRNKLYQMTDFILYTGYINEDSDRADDLVNTLRSSLKEDDKTTVYCKEADYLWKKYRESIREVADALDGDNIKKLSKSNIEIQEDKLRKCFISYADSVSEFTKLIYLLTRFLSGKEINDLVTTLINKFDNIRSFLEIMDELGLDRTFTAEYSFFEGSTKYLAELVELNSFVKSCSFDINAKRTMYRDALDILGIESDKTEEDIEKMIDNILQIDANGDKKLKKNNGLRNFIASNVIDSNRFKYLVRYGNPKKIRETAKCKPAVRFVLNEIPDAQIERYYEACCPKNTALCSANKRREKLADMIAEIKFENFSDAGNYQKANVTSRTSEAEIKRKNQAIIRLYLTVMYIMLKNLVNVNARYVIAFHCVERDTKLYAESGLEVGNIEKNKTNLTMAVMGVKLENGIIKTEFDKSFAENAANRYLRNARWYKLILDNLKKSERAVVNEFRNTVCHLNAIRNININIKEIKEVENYFALYHYLIQKHLENRFADKKVERDTGDFISKLEEHKTYCKDFVKAYCTPFGYNLVRYKNLTIDGLFDKNYPGKDDSDEQK

SEQ ID NO: 14 - protein, 1150 aa, Artificial Sequence
  Chemically Synthesized
MENLNKILDKENEICISKIFNTKGIAAPITEKALDNIKSKQKNDLNKEARLHYFSIGHSFKQIDTKKVFDYVLIEELKDEKPLKFITLQKDFFTKEFSIKLQKLINSIRNINNHYVHNFNDINLNKIDSNVFHFLKESFELAIIEKYYKVNKKYPLDNEIVLFLKELFIKDENTALLNYFTNLSKDEAIEYILTFTITENKIWNINNEHNILNIEKGKYLTFEAMLFLITIFLYKNEANHLLPKLYDFKNNKSKQELFTFFSKKFTSQDIDAEEGHLIKFRDMIQYLNHYPTAWNNDLKLESENKNKIMTTKLIDSIIEFELNSNYPSFATDIQFKKEAKAFLFASNKKRNQTSFSNKSYNEEIRHNPHIKQYRDEIASALTPISFNVKEDKFKIFVKKHVLEEYFPNSIGYEKFLEYNDFTEKEKEDFGLKLYSNPKTNKLIERIDNHKLVKSHGRNQDRFMDFSMRFLAENNYFGKDAFFKCYKFYDTQEQDEFLQSNENNDDVKFHKGKVTTYIKYEEHLKNYSYWDCPFVEENNSMSVKISIGSEEKILKIQRNLMIYFLENALYNENVENQGYKLVNNYYRELKKDVEESIASLDLIKSNPDFKSKYKKILPKRLLHNYAPAKQDKAPENAFETLLKKADFREEQYKKLLKKAEHEKNKEDFVKRNKGKQFKLHFIRKACQMMYFKEKYNTLKEGNAAFEKKDPVIEKRKNKEHEFGHHKNLNITREEFNDYCKWMFAFNGNDSYKKYLRDLFSEKHFFDNQEYKNLFESSVNLEAFYAKTKELFKKWIETNKPTNNENRYTLENYKNLILQKQVFINVYHFSKYLIDKNLLNSENNVIQYKSLENVEYLISDFYFQSKLSIDQYKTCGKLFNKLKSNKLEDCLLYEIAYNYIDKKNVHKIDIQKILTSKIILTINDANTPYKISVPFNKLERYTEMIAIKNQNNLKARFLIDLPLYLSKNKIKKGKDSAGYEIIIKNDLEIEDINTINNKIINDSVKFTEVLMELEKYFILKDKCILSKNYIDNSEIPSLKQFSKVWIKENENEIINYRNIACHFHLPLLETFDNLLLNVEQKFIKEELQNVSTINDLSKPQEYLILLFIKFKHNNFYLNLFNKNESKTIKNDKEVKKNRVLQKFINQVILKKK

SEQ ID NO: 15 - protein, 1110 aa, Artificial Sequence
  Chemically Synthesized
MKVRYRKQAQLDTFIIKTEIVNNDIFIKSIIEKAREKYRYSFLFDGEEKYHFKNKSSVEIVKNDIFSQTPDNMIRNYKITLKISEKNPRVVEAEIEDLMNSTILKDGRRSARREKSMTERKLIEEKVAENYSLLANCPIEEVDSIKIYKIKRFLTYRSNMLLYFASINSFLCEGIKGKDNETEEIWHLKDNDVRKEKVKENFKNKLIQSTENYNSSLKNQIEEKEKLSSKEFKKGAFYRTIIKKLQQERIKELSEKSLTEDCEKIIKLYSELRHPLMHYDYQYFENLFENKENSELTKNLNLDIFKSLPLVRKMKLNNKVNYLEDNDTLFVLQKTKKAKTLYQIYDALCEQKNGFNKFINDFFVSDGEENTVFKQIINEKFQSEMEFLEKRISESEKKNEKLKKKLDSMKAHFRNINSEDTKEAYFWDIHSSRNYKTKYNERKNLVNEYTKLLGSSKEKKLLREEITKINRQLLKLKQEMEEITKKNSLFRLEYKMKIAFGFLFCEFDGNISKFKDEFDASNQEKIIQYHKNGEKYLTSFLKEEEKEKFNLEKMQKIIQKTEEEDWLLPETKNNLFKFYLLTYLLLPYELKGDFLGFVKKHYYDIKNVDFMDENQNNIQVSQTVEKQEDYFYHKIRLFEKNTKKYEIVKYSIVPNEKLKQYFEDLGIDIKYLTGSVESGEKWLGENLGIDIKYLTVEQKSEVSEEKNKKVSLKNNGMFNKTILLFVFKYYQIAFKLFNDIELYSLFFLREKSEKPFEVFLEELKDKMIGKQLNFGQLLYVVYEVLVKNKDLDKILSKKIDYRKDKSFSPEIAYLRNFLSHLNYSKFLDNFMKINTNKSDENKEVLIPSIKIQKMIQFIEKCNLQNQIDFDFNFVNDFYMRKEKMFFIQLKQIFPDINSTEKQKKSEKEEILRKRYHLINKKNEQIKDEHEAQSQLYEKILSLQKIFSCDKNNFYRRLKEEKLLFLEKQGKKKISMKEIKDKIASDISDLLGILKKEITRDIKDKLTEKFRYCEEKLLNISFYNHQDKKKEEGIRVFLIRDKNSDNFKFESILDDGSNKIFISKNGKEITIQCCDKVLETLMIEKNTLKISSNGKIISLIPHYSYSIDVKY

SEQ ID NO: 16 - protein, 1111 aa, Artificial Sequence
  Chemically Synthesized
MEKFRRQNRSSIIKIIISNYDTKGIKELKVRYRKQAQLDTFIIKTEIVNNDIFIKSIIEKAREKYRYSFLFDGEEKYHFKNKSSVEIVKKDIFSQTPDNMIRNYKITLKISEKNPRVVEAEIEDLMNSTILKDGRRSARREKSMTERKLIEEKVAENYSLLANCPMEEVDSIKIYKIKRFLTYRSNMLLYFASINSFLCEGIKGKDNETEEIWHLKDNDVRKEKVKENFKNKLIQSTENYNSSLKNQIEEKEKLLRKESKKGAFYRTIIKKLQQERIKELSEKSLTEDCEKIIKLYSELRHPLMHYDYQYFENLFENKENSELTKNLNLDIFKSLPLVRKMKLNNKVNYLEDNDTLFVLQKTKKAKTLYQIYDALCEQKNGFNKFINDFFVSDGEENTVFKQIINEKFQSEIEFLEKRISESEKKNEKLKKKLDSMKAHFRNINSEDTKEAYFWDIHSSRNYKTKYNERKNLVNEYTELLGSSKEKKLLREEITKINRQLLKLKQEMEEITKKNSLFRLEYKMKMAFGFLFCEFDGNISRFKDEFDASNQEKIIQYHKNGEKYLTYFLKEEEKEKFNLKKLQETIQKTGEENWLLPQNKNNLFKFYLLTYLLLPYELKGDFLGFVKKHYYDIKNVDFMDENQSSKIIESKEDDFYHKIRLFEKNTKKYEIVKYSIVPDKKLKQYFKDLGIDTKYLILDQKSEVSGEKNKKVSLKNNGMFNKTILLFVFKYYQIAFKLFNDIELYSLFFLREKSGKPFEVFLKELKDKMIGKQLNFGQLLYVVYEVLVKNKDLSEILSERIDYRKDMCFSAEIADLRNFLSHLNYSKFLDNFMKINTNKSDENKEVLIPSIKIQKMIKFIEECNLQSQIDFDFNFVNDFYMRKEKMFFIQLKQIFPDINSTEKQKMNEKEEILRNRYHLTDKKNEQIKDEHEAQSQLYEKILSLQKIYSSDKNNFYGRLKEEKLLFLEKQEKKKLSMEEIKDKIAGDISDLLGILKKEITRDIKDKLTEKFRYCEEKLLNLSFYNHQDKKKEESIRVFLIRDKNSDNFKFESILDDGSNKIFISKNGKEITIQCCDKVLETLIIEKNTLKISSNGKIISLIPHYSYSIDVKY

SEQ ID NO: 17 - protein, 668 aa, Artificial Sequence
  Chemically Synthesized
MTEKKSIIFKNKSSVEIVKKDIFSQTPDNMIRNYKITLKISEKNPRVVEAEIEDLMNSTILKDGRRSARREKSMTERKLIEEKVAENYSLLANCPMEEVDSIKIYKIKRFLTYRSNMLLYFASINSFLCEGIKGKDNETEEIWHLKDNDVRKEKVKENFKNKLIQSTENYNSSLKNQIEEKEKLLRKESKKGAFYRTIIKKLQQERIKELSEKSLTEDCEKIIKLYSELRHPLMHYDYQYFENLFENKENSELTKNLNLDIFKSLPLVRKMKLNNKVNYLEDNDTLFVLQKTKKAKTLYQIYDALCEQKNGFNKFINDFFVSDGEENTVFKQIINEKFQSEMEFLEKRISESEKKNEKLKKKFDSMKAHFHNINSEDTKEAYFWDIHSSSNYKTKYNERKNLVNEYTELLGSSKEKKLLREEITQINRKLLKLKQEMEEITKKNSLFRLEYKMKIAFGFLFCEFDGNISKFKDEFDASNQEKIIQYHKNGEKYLTYFLKEEEKEKFNLEKMQKIIQKTEEEDWLLPETKNNLFKFYLLTYLLLPYELKGDFLGFVKKHYYDIKNVDFMDENQNNIQVSQTVEKQEDYFYHKIRLFEKNTKKYEIVKYSIVPNEKLKQYFEDLGIDIKYLTGSVESGEKWLGENLGIDIKYLTVEQKSEVSEEKIKKFL

SEQ ID NO: 18 - protein, 1115 aa, Artificial Sequence
  Chemically Synthesized
MEKFRRQNRNSIIKIIISNYDTKGIKELKVRYRKQAQLDTFIIKTEIVNNDIFIKSIIEKAREKYRYSFLFDGEEKYHFKNKSSVEIVKKDIFSQTPDNMIRNYKITLKISEKNPRVVEAEIEDLMNSTILKDGRRSARREKSMTERKLIEEKVAKNYSLLANCPMEEVDSIKIYKIKRFLTYRSNMLLYFASINSFLCEGIKGKDNETEEIWHLKDNDVRKEKVRENFKNKLIQSTENYNSSLKNQIEEKEKLLRKEFKKGAFYRTIIKKLQQERIKELSEKSLTEDCEKIIKLYSKLRHSLMHYDYQYFENLFENKKNDDLMKDLNLDLFKSLPLIRKMKLNNKVNYLEDGDTLFVLQKTKKAKTLYQIYDALCEQKNGFNKFINDFFVSDGEENTVFKQIINEKFQSEMEFLEKRISESEKKNEKLKKKLDSMKAHFRNINSEDTKEAYFWDIHSSRNYKTKYNERKNLVNEYTELLGSSKEKKLLREEITKINRQLLKLKQEMEEITKKNSLFRLEYKMKIAFGFLFCEFDGNISKFKDEFDASNQEKIIQYHKNGEKYLTSFLKEEEKEKFNLEKMQKIIQKTEEEDWLLPETKNNLFKFYLLTYLLLPYELKGDFLGFVKKHYYDIKNVDFIDENQNNIQVSQTVEKQEDYFYHKIRLFEKNTKKYEIVKYSIVPNEKLKQYFEDLGIDIKYLTVEQKSEVSEEKNKKVSLKNNGMFNKTILLFVFKYYQIAFKLFNDIELYSLFFLREKSGKPLEIFRKELESKMKDGYLNFGQLLYVVYEVLVKNKDLDKILSKKIDYRKDKSFSPEIAYLRNFLSHLNYSKFLDNFMKINTNKSDENKEVLIPSIKIQKMIQFIEKCNLQNQIDFDFNFVNDFYMRKEKMFFIQLKQIFPDINSTEKQKMNEKEEILRNRYHLTDKKNEQIKDEHEAQSQLYEKILSLQKIYSSDKNNFYGRLKEEKLLFLEKQGKKKLSMEEIKDKIAGDISDLLGILKKEITRDIKDKLTEKFRYCEEKLLNLSFYNHQDKKKEESIRVFLIRDKNSDNFKFESILDDGSNKIFISKNGKEITIQCCDKVLETLIIEKNTLKISSNGKIISLIPHYSYSIDVKY

SEQ ID NO: 19 - protein, 1121 aa, Artificial Sequence
  Chemically Synthesized
MGKPNRSSIIKIIISNYDNKGIKEVKVRYNKQAQLDTFLIKSELKDGKFILYSIVDKAREKYRYSFEIDKTNINKNEILIIKKDIYSNKEDKVIRKYILSFEVSEKNDRTIVTKIKDCLETQKKEKFERENTRRLISETERKLLSEETQKTYSKIACCSPEDIDSVKIYKIKRYLAYRSNMLLFFSLINDIFVKGVVKDNGEEVGEIWRIIDSKEIDEKKTYDLLVENFKKRMSQEFINYKQSIENKIEKNTNKIKEIEQKLKKEKYKKEINRLKKQLIELNRENDLLEKDKIELSDEEIREDIEKILKIYSDLRHKLMHYNYQYFENLFENKKISKEKNEDVNLTELLDLNLFRYLPLVRQLKLENKTNYLEKEDKITVLGVSDSAIKYYSYYNFLCEQKNGFNNFINSFFSNDGEENKSFKEKINLSLEKEIEIMEKETNEKIKEINKNELQLMKEQKELGTAYVLDIHSLNDYKISHNERNKNVKLQNDIMNGNRDKNALDKINKKLVELKIKMDKITKRNSILRLKYKLQVAYGFLMEEYKGNIKKFKDEFDISKEKIKSYKSKGEKYLEVKSEKKYITKILNSIEDIHNITWLKNQEENNLFKFYVLTYILLPFEFRGDFLGFVKKHYYDIKNVEFLDENNDRLTPEQLEKMKNDSFFNKIRLFEKNSKKYDILKESILTSERIGKYFSLLNTGAKYFEYGGEENRGIFNKNIIIPIFKYYQIVLKLYNDVELAMLLTLSESDEKDINKIKELVTLKEKVSPKKIDYEKKYKFSVLLDCFNRIINLGKKDFLASEEVKEVAKTFTNLAYLRNKICHLNYSKFIDDLLTIDTNKSTTDSEGKLLINDRIRKLIKFIRENNQKMNISIDYNYINDYYMKKEKFIFGQRKQAKTIIDSGKKANKRNKAEELLKMYRVKKENINLIYELSKKLNELTKSELFLLDKKLLKDIDFTDVKIKNKSFFELKNDVKEVANIKQALQKHSSELIGIYKKEVIMAIKRSIVSKLIYDEEKVLSIIIYDKTNKKYEDFLLEIRRERDINKFQFLIDEKKEKLGYEKIIETKEKKKVVVKIQNNSELVSEPRIIKNKDKKKAKTPEEISKLGILDLTNHYCFNLKITL

SEQ ID NO: 20 - protein, 897 aa, Artificial Sequence
  Chemically Synthesized
MENKGNNKKIDFDENYNILVAQIKEYFTKEIENYNNRIDNIIDKKELLKYSEKKEESEKNKKLEELNKLKSQKLKILTDEEIKADVIKIIKIFSDLRHSLMHYEYKYFENLFENKKNEELAELLNLNLFKNLTLLRQMKIENKTNYLEGREEFNIIGKNIKAKEVLGHYNLLAEQKNGFNNFINSFFVQDGTENLEFKKLIDEHFVNAKKRLERNIKKSKKLEKELEKMEQHYQRLNCAYVWDIHTSTTYKKLYNKRKSLIEEYNKQINEIKDKEVITAINVELLRIKKEMEEITKSNSLFRLKYKMQIAYAFLEIEFGGNIAKFKDEFDCSKMEEVQKYLKKGVKYLKYYKDKEAQKNYEFPFEEIFENKDTHNEEWLENTSENNLFKFYILTYLLLPMEFKGDFLGVVKKHYYDIKNVDFTDESEKELSQVQLDKMIGDSFFHKIRLFEKNTKRYEIIKYSILTSDEIKRYFRLLELDVPYFEYEKGTDEIGIFNKNIILTIFKYYQIIFRLYNDLEIHGLFNISSDLDKILRDLKSYGNKNINFREFLYVIKQNNNSSTEEEYRKIWENLEAKYLRLHLLTPEKEEIKTKTKEELEKLNEISNLRNGICHLNYKEIIEEILKTEISEKNKEATLNEKIRKVINFIKENELDKVELGFNFINDFFMKKEQFMFGQIKQVKEGNSDSITTERERKEKNNKKLKETYELNCDNLSEFYETSNNLRERANSSSLLEDSAFLKKIGLYKVKNNKVNSKVKDEEKRIENIKRKLLKDSSDIMGMYKAEVVKKLKEKLILIFKHDEEKRIYVTVYDTSKAVPENISKEILVKRNNSKEEYFFEDNNKKYVTEYYTLEITETNELKVIPAKKLEGKEFKTEKNKENKLMLNNHYCFNVKIIY

SEQ ID NO: 21 - protein, 1285 aa, Artificial Sequence
  Chemically Synthesized
MKLTRRRISGNSVDQKITAAFYRDMSQGLLYYDSEDNDCTDKVIESMDFERSWRGRILKNGEDDKNPFYMFVKGLVGSNDKIVCEPIDVDSDPDNLDILINKNLTGFGRNLKAPDSNDTLENLIRKIQAGIPEEEVLPELKKIKEMIQKDIVNRKEQLLKSIKNNRIPFSLEGSKLVPSTKKMKWLFKLIDVPNKTFNEKMLEKYWEIYDYDKLKANITNRLDKTDKKARSISRAVSEELREYHKNLRTNYNRFVSGDRPAAGLDNGGSAKYNPDKEEFLLFLKEVEQYFKKYFPVKSKHSNKSKDKSLVDKYKNYCSYKVVKKEVNRSIINQLVAGLIQQGKLLYYFYYNDTWQEDFLNSYGLSYIQVEEAFKKSVMTSLSWGINRLTSFFIDDSNTVKFDDITTKKAKEAIESNYFNKLRTCSRMQDHFKEKLAFFYPVYVKDKKDRPDDDIENLIVLVKNAIESVSYLRNRTFHFKESSLLELLKELDDKNSGQNKIDYSVAAEFIKRDIENLYDVFREQIRSLGIAEYYKADMISDCFKTCGLEFALYSPKNSLMPAFKNVYKRGANLNKAYIRDKGPKETGDQGQNSYKALEEYRELTWYIEVKNNDQSYNAYKNLLQLIYYHAFLPEVRENEALITDFINRTKEWNRKETEERLNTKNNKKHKNFDENDDITVNTYRYESIPDYQGESLDDYLKVLQRKQMARAKEVNEKEEGNNNYIQFIRDVVVWAFGAYLENKLKNYKNELQPPLSKENIGLNDTLKELFPEEKVKSPFNIKCRFSISTFIDNKGKSTDNTSAEAVKTDGKEDEKDKKNIKRKDLLCFYLFLRLLDENEICKLQHQFIKYRCSLKERRFPGNRTKLEKETELLAELEELMELVRFTMPSIPEISAKAESGYDTMIKKYFKDFIEKKVFKNPKTSNLYYHSDSKTPVTRKYMALLMRSAPLHLYKDIFKGYYLITKKECLEYIKLSNIIKDYQNSLNELHEQLERIKLKSEKQNGKDSLYLDKKDFYKVKEYVENLEQVARYKHLQHKINFESLYRIFRIHVDIAARMVGYTQDWERDMHFLFKALVYNGVLEERRFEAIFNNNDDNNDGRIVKKIQNNLNNKNRELVSMLCWNKKLNKNEFGAIIWKRNPIAHLNHFTQTEQNSKSSLESLINSLRILLAYDRKRQNAVTKTINDLLLNDYHIRIKWEGRVDEGQIYFNIKEKEDIENEPIIHLKHLHKKDCYIYKNSYMFDKQKEWICNGIKEEVYDKSILKCIGNLFKFDYEDKNKSSANPKHT

SEQ ID NO: 22 - protein, 1051 aa, Artificial Sequence
  Chemically Synthesized
MKITKMRVDGRTIVMERTSKEGQLGYEGIDGNKTTEIIFDKKKESFYKSILNKTVRKPDEKEKNRRKQAINKAINKEITELMLAVLHQEVPSQKLHNLKSLNTESLTKLFKPKFQNMISYPPSKGAEHVQFCLTDIAVPAIRDLDEIKPDWGIFFEKLKPYTDWAESYIHYKQTTIQKSIEQNKIQSPDSPRKLVLQKYVTAFLNGEPLGLDLVAKKYKLADLAESFKLVDLNEDKSANYKIKACLQQHQRNILDELKEDPELNQYGIEVKKYIQRYFPIKRAPNRSKHARADFLKKELIESTVEQQFKNAVYHYVLEQGKMEAYELTDPKTKDLQDIRSGEAFSFKFINACAFASNNLKMILNPECEKDILGKGNFKKNLPNSTTRSDVVKKMIPFFSDELQNVNFDEAIWAIRGSIQQIRNEVYHCKKHSWKSILKIKGFEFEPNNMKYADSDMQKLMDKDIAKIPEFIEEKLKSSGVVRFYRHDELQSIWEMKQGFSLLTTNAPFVPSFKRVYAKGHDYQTSKNRYYNLDLTTFDILEYGEEDFRARYFLTKLVYYQQFMPWFTADNNAFRDAANFVLRLNKNRQQDAKAFINIREVEEGEMPRDYMGYVQGQIAIHEDSIEDTPNHFEKFISQVFIKGFDRHMRSANLKFIKNPRNQGLEQSEIEEMSFDIKVEPSFLKNKDDYIAFWIFCKMLDARHLSELRNEMIKYDGHLTGEQEIIGLALLGVDSRENDWKQFFSSEREYEKIMKGYVVEELYQREPYRQSDGKTPILFRGVEQARKYGTETVIQRLFDANPEFKVSKCNLAEWERQKETIEETIKRRKELHNEWAKNPKKPQNNAFFKEYKECCDAIDAYNWHKNKTTLAYVNELHHLLIEILGRYVGYVAIADRDFQCMANQYFKHSGITERVEYWGDNRLKSIKKLDTFLKKEGLFVSEKNARNHIAHLNYLSLKSECTLLYLSERLREIFKYDRKLKNAVSKSLIDILDRHGMSVVFANLKENKHRLVIKSLEPKKLRHLGGKKIDGGYIETNQVSEEYCGIVKRLLEM

SEQ ID NO: 23 - protein, 1340 aa, Artificial Sequence
  Chemically Synthesized
MQISKVNHKHVAVGQKDRERITGFIYNDPVGDEKSLEDVVAKRANDTKVLFNVFNTKDLYDSQESDKSEKDKEIISKGAKFVAKSFNSAITILKKQNKIYSTLTSQQVIKELKDKFGGARIYDDDIEEALTETLKKSFRKENVRNSIKVLIENAAGIRSSLSKDEEELIQEYFVKQLVEEYTKTKLQKNVVKSIKNQNMVIQPDSDSQVLSLSESRREKQSSAVSSDTLVNCKEKDVLKAFLTDYAVLDEDERNSLLWKLRNLVNLYFYGSESIRDYSYTKEKSVWKEHDEQKANKTLFIDEICHITKIGKNGKEQKVLDYEENRSRCRKQNINYYRSALNYAKNNTSGIFENEDSNHFWIHLIENEVERLYNGIENGEEFKFETGYISEKVWKAVINHLSIKYIALGKAVYNYAMKELSSPGDIEPGKIDDSYINGITSFDYEIIKAEESLQRDISMNVVFATNYLACATVDTDKDFLLFSKEDIRSCTKKDGNLCKNIMQFWGGYSTWKNFCEEYLKDDKDALELLYSLKSMLYSMRNSSFHFSTENVDNGSWDTELIGKLFEEDCNRAARIEKEKFYNNNLHMFYSSSLLEKVLERLYSSHHERASQVPSFNRVFVRKNFPSSLSEQRITPKFTDSKDEQIWQSAVYYLCKEIYYNDFLQSKEAYKLFREGVKNLDKNDINNQKAADSFKQAVVYYGKAIGNATLSQVCQAIMTEYNRQNNDGLKKKSAYAEKQNSNKYKHYPLFLKQVLQSAFWEYLDENKEIYGFISAQIHKSNVEIKAEDFIANYSSQQYKKLVDKVKKTPELQKWYTLGRLINPRQANQFLGSIRNYVQFVKDIQRRAKENGNPIRNYYEVLESDSIIKILEMCTKLNGTTSNDIHDYFRDEDEYAEYISQFVNFGDVHSGAALNAFCNSESEGKKNGIYYDGINPIVNRNWVLCKLYGSPDLISKIISRVNENMIHDFHKQEDLIREYQIKGICSNKKEQQDLRTFQVLKNRVELRDIVEYSEIINELYGQLIKWCYLRERDLMYFQLGFHYLCLNNASSKEADYIKINVDDRNISGAILYQIAAMYINGLPVYYKKDDMYVALKSGKKASDELNSNEQTSKKINYFLKYGNNILGDKKDQLYLAGLELFENVAEHENIIIFRNEIDHFHYFYDRDRSMLDLYSEVFDRFFTYDMKLRKNVVNMLYNILLDHNIVSSFVFETGEKKVGRGDSEVIKPSAKIRLRANNGVSSDVFTYKVGSKDELKIATLPAKNEEFLLNVARLIYYPDMEAVSENMVREGVVKVEKSNDKKGKISRGSNTRSSNQSKYNNKSKNRMNYSMGSIFEKMDLKFD

SEQ ID NO: 24 - protein, 1437 aa, Artificial Sequence
  Chemically Synthesized
MKISKVREENRGAKLTVNAKTAVVSENRSQEGILYNDPSRYGKSRKNDEDRDRYIESRLKSSGKLYRIFNEDKNKRETDELQWFLSEIVKKINRRNGLVLSDMLSVDDRAFEKAFEKYAELSYTNRRNKVSGSPAFETCGVDAATAERLKGIISETNFINRIKNNIDNKVSEDIIDRIIAKYLKKSLCRERVKRGLKKLLMNAFDLPYSDPDIDVQRDFIDYVLEDFYHVRAKSQVSRSIKNMNMPVQPEGDGKFAITVSKGGTESGNKRSAEKEAFKKFLSDYASLDERVRDDMLRRMRRLVVLYFYGSDDSKLSDVNEKFDVWEDHAARRVDNREFIKLPLENKLANGKTDKDAERIRKNTVKELYRNQNIGCYRQAVKAVEEDNNGRYFDDKMLNMFFIHRIEYGVEKIYANLKQVTEFKARTGYLSEKIWKDLINYISIKYIAMGKAVYNYAMDELNASDKKEIELGKISEEYLSGISSFDYELIKAEEMLQRETAVYVAFAARHLSSQTVELDSENSDFLLLKPKGTMDKNDKNKLASNNILNFLKDKETLRDTILQYFGGHSLWTDFPFDKYLAGGKDDVDFLTDLKDVIYSMRNDSFHYATENHNNGKWNKELISAMFEHETERMTVVMKDKFYSNNLPMFYKNDDLKKLLIDLYKDNVERASQVPSFNKVFVRKNFPALVRDKDNLGIELDLKADADKGENELKFYNALYYMFKEIYYNAFLNDKNVRERFITKATKVADNYDRNKERNLKDRIKSAGSDEKKKLREQLQNYIAENDFGQRIKNIVQVNPDYTLAQICQLIMTEYNQQNNGCMQKKSAARKDINKDSYQHYKMLLLVNLRKAFLEFIKENYAFVLKPYKHDLCDKADFVPDFAKYVKPYAGLISRVAGSSELQKWYIVSRFLSPAQANHMLGFLHSYKQYVWDIYRRASETGTEINHSIAEDKIAGVDITDVDAVIDLSVKLCGTISSEISDYFKDDEVYAEYISSYLDFEYDGGNYKDSLNRFCNSDAVNDQKVALYYDGEHPKLNRNIILSKLYGERRFLEKITDRVSRSDIVEYYKLKKETSQYQTKGIFDSEDEQKNIKKFQEMKNIVEFRDLMDYSEIADELQGQLINWIYLRERDLMNFQLGYHYACLNNDSNKQATYVTLDYQGKKNRKINGAILYQICAMYINGLPLYYVDKDSSEWTVSDGKESTGAKIGEFYRYAKSFENTSDCYASGLEIFENISEHDNITELRNYIEHFRYYSSFDRSFLGIYSEVFDRFFTYDLKYRKNVPTILYNILLQHFVNVRFEFVSGKKMIGIDKKDRKIAKEKECARITIREKNGVYSEQFTYKLKNGTVYVDARDKRYLQSIIRLLFYPEKVNMDEMIEVKEKKKPSDNNTGKGYSKRDRQQDRKEYDKYKEKKKKEGNFLSGMGGNINWDEINAQLKN

SEQ ID NO: 25 - protein, 1159 aa, Artificial Sequence
  Chemically Synthesized
MKVTKVGGISHKKYTSEGRLVKSESEENRTDERLSALLNMRLDMYIKNPSSTETKENQKRIGKLKKFFSNKMVYLKDNTLSLKNGKKENIDREYSETDILESDVRDKKNFAVLKKIYLNENVNSEELEVFRNDIKKKLNKINSLKYSFEKNKANYQKINENNIEKVEGKSKRNIIYDYYRESAKRDAYVSNVKEAFDKLYKEEDIAKLVLEIENLTKLEKYKIREFYHEIIGRKNDKENFAKIIYEEIQNVNNMKELIEKVPDMSELKKSQVFYKYYLDKEELNDKNIKYAFCHFVEIEMSQLLKNYVYKRLSNISNDKIKRIFEYQNLKKLIENKLLNKLDTYVRNCGKYNYYLQDGEIATSDFIARNRQNEAFLRNIIGVSSVAYFSLRNILETENENDITGRMRGKTVKNNKGEEKYVSGEVDKIYNENKKNEVKENLKMFYSYDFNMDNKNEIEDFFANIDEAISSIRHGIVHFNLELEGKDIFAFKNIAPSEISKKMFQNEINEKKLKLKIFRQLNSANVFRYLEKYKILNYLKRTRFEFVNKNIPFVPSFTKLYSRIDDLKNSLGIYWKTPKTNDDNKTKEIIDAQIYLLKNIYYGEFLNYFMSNNGNFFEISKEIIELNKNDKRNLKTGFYKLQKFEDIQEKIPKEYLANIQSLYMINAGNQDEEEKDTYIDFIQKIFLKGFMTYLANNGRLSLIYIGSDEETNTSLAEKKQEFDKFLKKYEQNNNIKIPYEINEFLREIKLGNILKYTERLNMFYLILKLLNHKELTNLKGSLEKYQSANKEEAFSDQLELINLLNLDNNRVTEDFELEADEIGKFLDFNGNKVKDNKELKKFDTNKIYFDGENIIKHRAFYNIKKYGMLNLLEKIADKAGYKISIEELKKYSNKKNEIEKNHKMQENLHRKYARPRKDEKFTDEDYESYKQAIENIEEYTHLKNKVEFNELNLLQGLLLRILHRLVGYTSIWERDLRFRLKGEFPENQYIEEIFNFENKKNVKYKGGQIVEKYIKFYKELHQNDEVKINKYSSANIKVLKQEKKDLYIRNYIAHFNYIPHAEISLLEVLENLRKLLSYDRKLKNAVMKSVVDILKEYGFVATFKIGADKKIGIQTLESEKIVHLKNLKKKKLMTDRNSEELCKLVKIMFEYKMEEKKSEN

SEQ ID NO: 26 - protein, 1120 aa, Artificial Sequence
  Chemically Synthesized
MWISIKTLIHHLGVLFFCDYMYNRREKKIIEVKTMRITKVEVDRKKVLISRDKNGGKLVYENEMQDNTEQIMHHKKSSFYKSVVNKTICRPEQKQMKKLVHGLLQENSQEKIKVSDVTKLNISNFLNHRFKKSLYYFPENSPDKSEEYRIEINLSQLLEDSLKKQQGTFICWESFSKDMELYINWAENYISSKTKLIKKSIRNNRIQSTESRSGQLMDRYMKDILNKNKPFDIQSVSEKYQLEKLTSALKATFKEAKKNDKEINYKLKSTLQNHERQIIEELKENSELNQFNIEIRKHLETYFPIKKTNRKVGDIRNLEIGEIQKIVNHRLKNKIVQRILQEGKLASYEIESTVNSNSLQKIKIEEAFALKFINACLFASNNLRNMVYPVCKKDILMIGEFKNSFKEIKHKKFIRQWSQFFSQEITVDDIELASWGLRGAIAPIRNEIIHLKKHSWKKFFNNPTFKVKKSKIINGKTKDVTSEFLYKETLFKDYFYSELDSVPELIINKMESSKILDYYSSDQLNQVFTIPNFELSLLTSAVPFAPSFKRVYLKGFDYQNQDEAQPDYNLKLNIYNEKAFNSEAFQAQYSLFKMVYYQVFLPQFTTNNDLFKSSVDFILTLNKERKGYAKAFQDIRKMNKDEKPSEYMSYIQSQLMLYQKKQEEKEKINHFEKFINQVFIKGFNSFIEKNRLTYICHPTKNTVPENDNIEIPFHTDMDDSNIAFWLMCKLLDAKQLSELRNEMIKFSCSLQSTEEISTFTKAREVIGLALLNGEKGCNDWKELFDDKEAWKKNMSLYVSEELLQSLPYTQEDGQTPVINRSIDLVKKYGTETILEKLFSSSDDYKVSAKDIAKLHEYDVTEKIAQQESLHKQWIEKPGLARDSAWTKKYQNVINDISNYQWAKTKVELTQVRHLHQLTIDLLSRLAGYMSIADRDFQFSSNYILERENSEYRVTSWILLSENKNKNKYNDYELYNLKNASIKVSSKNDPQLKVDLKQLRLTLEYLELFDNRLKEKRNNISHFNYLNGQLGNSILELFDDARDVLSYDRKLKNAVSKSLKEILSSHGMEVTFKPLYQTNHHLKIDKLQPKKIHHLGEKSTVSSNQVSNEYCQLVRTLLTMK

SEQ ID NO: 27 - protein, 1389 aa, Artificial Sequence
  Chemically Synthesized
MGNLFGHKRWYEVRDKKDFKIKRKVKVKRNYDGNKYILNINENNNKEKIDNNKFIRKYINYKKNDNILKEFTRKFHAGNILFKLKGKEGIIRIENNDDFLETEEVVLYIEAYGKSEKLKALGITKKKIIDEAIRQGITKDDKKIEIKRQENEEEIEIDIRDEYTNKTLNDCSIILRIIENDELETKKSIYEIFKNINMSLYKIIEKIIENETEKVFENRYYEEHLREKLLKDDKIDVILTNFMEIREKIKSNLEILGFVKFYLNVGGDKKKSKNKKMLVEKILNINVDLTVEDIADFVIKELEFWNITKRIEKVKKVNNEFLEKRRNRTYIKSYVLLDKHEKFKIERENKKDKIVKFFVENIKNNSIKEKIEKILAEFKIDELIKKLEKELKKGNCDTEIFGIFKKHYKVNFDSKKFSKKSDEEKELYKIIYRYLKGRIEKILVNEQKVRLKKMEKIEIEKILNESILSEKILKRVKQYTLEHIMYLGKLRHNDIDMTTVNTDDFSRLHAKEELDLELITFFASTNMELNKIFSRENINNDENIDFFGGDREKNYVLDKKILNSKIKIIRDLDFIDNKNNITNNFIRKFTKIGTNERNRILHAISKERDLQGTQDDYNKVINIIQNLKISDEEVSKALNLDVVFKDKKNIITKINDIKISEENNNDIKYLPSFSKVLPEILNLYRNNPKNEPFDTIETEKIVLNALIYVNKELYKKLILEDDLEENESKNIFLQELKKTLGNIDEIDENIIENYYKNAQISASKGNNKAIKKYQKKVIECYIGYLRKNYEELFDFSDFKMNIQEIKKQIKDINDNKTYERITVKTSDKTIVINDDFEYIISIFALLNSNAVINKIRNRFFATSVWLNTSEYQNIIDILDEIMQLNTLRNECITENWNLNLEEFIQKMKEIEKDFDDFKIQTKKEIFNNYYEDIKNNILTEFKDDINGCDVLEKKLEKIVIFDDETKFEIDKKSNILQDEQRKLSNINKKDLKKKVDQYIKDKDQEIKSKILCRIIFNSDFLKKYKKEIDNLIEDMESENENKFQEIYYPKERKNELYIYKKNLFLNIGNPNFDKIYGLISNDIKMADAKFLFNIDGKNIRKNKISEIDAILKNLNDKLNGYSKEYKEKYIKKLKENDDFFAKNIQNKNYKSFEKDYNRVSEYKKIRDLVEFNYLNKIESYLIDINWKLAIQMARFERDMHYIVNGLRELGIIKLSGYNTGISRAYPKRNGSDGFYTTTAYYKFFDEESYKKFEKICYGFGIDLSENSEINKPENESIRNYISHFYIVRNPFADYSIAEQIDRVSNLLSYSTRYNNSTYASVFEVFKKDVNLDYDELKKKFKLIGNNDILERLMKPKKVSVLELESYNSDYIKNLIIELLTKIENTNDTL

SEQ ID NO: 28 - protein, 1385 aa, Artificial Sequence
  Chemically Synthesized
MGNLFGHKRWYEVRDKKDFKIKRKVKVKRNYDGNKYILNINENNNKEKIDNNKFIGEFVNYKKNNNVLKEFKRKFHAGNILFKLKGKEEIIRIENNDDFLETEEVVLYIEVYGKSEKLKALEITKKKIIDEAIRQGITKDDKKIEIKRQENEEEIEIDIRDEYTNKTLNDCSIILRIIENDELETKKSIYEIFKNINMSLYKIIEKIIENETEKVFENRYYEEHLREKLLKDNKIDVILTNFMEIREKIKSNLEIMGFVKFYLNVSGDKKKSENKKMFVEKILNTNVDLTVEDIVDFIVKELKFWNITKRIEKVKKFNNEFLENRRNRTYIKSYVLLDKHEKFKIERENKKDKIVKFFVENIKNNSIKEKIEKILAEFKINELIKKLEKELKKGNCDTEIFGIFKKHYKVNFDSKKFSNKSDEEKELYKIIYRYLKGRIEKILVNEQKVRLKKMEKIEIEKILNESILSEKILKRVKQYTLEHIMYLGKLRHNDIVKMTVNTDDFSRLHAKEELDLELITFFASTNMELNKIFNGKEKVTDFFGFNLNGQKITLKEKVPSFKLNILKKLNFINNENNIDEKLSHFYSFQKEGYLLRNKILHNSYGNIQETKNLKGEYENVEKLIKELKVSDEEISKSLSLDVIFEGKVDIINKINSLKIGEYKDKKYLPSFSKIVLEITRKFREINKDKLFDIESEKIILNAVKYVNKILYEKITSNEENEFLKTLPDKLVKKSNNKKENKNLLSIEEYYKNAQVSSSKGDKKAIKKYQNKVTNAYLEYLENTFTEIIDFSKFNLNYDEIKTKIEERKDNKSKIIIDSISTNINITNDIEYIISIFALLNSNTYINKIRNRFFATSVWLEKQNGTKEYDYENIISILDEVLLINLLRENNITDILDLKNAIIDAKIVENDETYIKNYIFESNEEKLKKRLFCEELVDKEDIRKIFEDENFKFKSFIKKNEIGNFKINFGILSNLECNSEVEAKKIIGKNSKKLESFIQNIIDEYKSNIRTLFSSEFLEKYKEEIDNLVEDTESENKNKFEKIYYPKEHKNELYIYKKNLFLNIGNPNFDKIYGLISKDIKNVDTKILFDDDIKKNKISEIDAILKNLNDKLNGYSNDYKAKYVNKLKENDDFFAKNIQNENYSSFGEFEKDYNKVSEYKKIRDLVEFNYLNKIESYLIDINWKLAIQMARFERDMHYIVNGLRELGIIKLSGYNTGISRAYPKRNGSDGFYTTTAYYKFFDEESYKKFEKICYGFGIDLSENSEINKPENESIRNYISHFYIVRNPFADYSIAEQIDRVSNLLSYSTRYNNSTYASVFEVFKKDVNLDYDELKKKFRLIGNNDILERLMKPKKVSVLELESYNSDYIKNLIIELLTKIENTNDTL

SEQ ID NO: 29 - protein, 1152 aa, Artificial Sequence
  Chemically Synthesized
MKVTKVDGISHKKYIEEGKLVKSTSEENRTSERLSELLSIRLDIYIKNPDNASEEENRIRRENLKKFFSNKVLHLKDSVLYLKNRKEKNAVQDKNYSEEDISEYDLKNKNSFSVLKKILLNEDVNSEELEIFRKDVEAKLNKINSLKYSFEENKANYQKINENNVEKVGGKSKRNIIYDYYRESAKRNDYINNVQEAFDKLYKKEDIEKLFFLIENSKKHEKYKIREYYHKIIGRKNDKENFAKIIYEEIQNVNNIKELIEKIPDMSELKKSQVFYKYYLDKEELNDKNIKYAFCHFVEIEMSQLLKNYVYKRLSNISNDKIKRIFEYQNLKKLIENKLLNKLDTYVRNCGKYNYYLQVGEIATSDFIARNRQNEAFLRNIIGVSSVAYFSLRNILETENENDITGRMRGKTVKNNKGEEKYVSGEVDKIYNENKQNEVKENLKMFYSYDFNMDNKNEIEDFFANIDEAISSIRHGIVHFNLELEGKDIFAFKNIAPSEISKKMFQNEINEKKLKLKIFKQLNSANVFNYYEKDVIIKYLKNTKFNFVNKNIPFVPSFTKLYNKIEDLRNTLKFFWSVPKDKEEKDAQIYLLKNIYYGEFLNKFVKNSKVFFKITNEVIKINKQRNQKTGHYKYQKFENIEKTVPVEYLAIIQSREMINNQDKEEKNTYIDFIQQIFLKGFIDYLNKNNLKYIESNNNNDNNDIFSKIKIKKDNKEKYDKILKNYEKHNRNKEIPHEINEFVREIKLGKILKYTENLNMFYLILKLLNHKELTNLKGSLEKYQSANKEETFSDELELINLLNLDNNRVTEDFELEANEIGKFLDFNENKIKDRKELKKFDTNKIYFDGENIIKHRAFYNIKKYGMLNLLEKIADKAKYKISLKELKEYSNKKNEIEKNYTMQQNLHRKYARPKKDEKFNDEDYKEYEKAIGNIQKYTHLKNKVEFNELNLLQGLLLKILHRLVGYTSIWERDLRFRLKGEFPENHYIEEIFNFDNSKNVKYKSGQIVEKYINFYKELYKDNVEKRSIYSDKKVKKLKQEKKDLYIRNYIAHFNYIPHAEISLLEVLENLRKLLSYDRKLKNAIMKSIVDILKEYGFVATFKIGADKKIEIQTLESEKIVHLKNLKKKKLMTDRNSEELCELVKVMFEYKALE

SEQ ID NO: 30 - protein, 1152 aa, Artificial Sequence; identical to SEQ ID NO: 29
  Chemically Synthesized

SEQ ID NO: 31 - protein, 970 aa, Artificial Sequence
  Chemically Synthesized
MLALLHQEVPSQKLHNLKSLNTESLTKLFKPKFQNMISYPPSKGAEHVQFCLTDIAVPAIRDLDEIKPDWGIFFEKLKPYTDWAESYIHYKQTTIQKSIEQNKIQSPDSPRKLVLQKYVTAFLNGEPLGLDLVAKKYKLADLAESFKVVDLNEDKSANYKIKACLQQHQRNILDELKEDPELNQYGIEVKKYIQRYFPIKRAPNRSKHARADFLKKELIESTVEQQFKNAVYHYVLEQGKMEAYELTDPKTKDLQDIRSGEAFSFKFINACAFASNNLKMILNPECEKDILGKGDFKKNLPNSTTQSDVVKKMIPFFSDEIQNVNFDEAIWAIRGSIQQIRNEVYHCKKHSWKSILKIKGFEFEPNNMKYTDSDMQKLMDKDIAKIPDFIEEKLKSSGIIRFYSHDKLQSIWEMKQGFSLLTTNAPFVPSFKRVYAKGHDYQTSKNRYYDLGLTTFDILEYGEEDFRARYFLTKLVYYQQFMPWFTADNNAFRDAANFVLRLNKNRQQDAKAFINIREVEEGEMPRDYMGYVQGQIAIHEDSTEDTPNHFEKFISQVFIKGFDSHMRSADLKFIKNPRNQGLEQSEIEEMSFDIKVEPSFLKNKDDYIAFWTFCKMLDARHLSELRNEMIKYDGHLTGEQEIIGLALLGVDSRENDWKQFFSSEREYEKIMKGYVGEELYQREPYRQSDGKTPILFRGVEQARKYGTETVIQRLFDASPEFKVSKCNITEWERQKETIEETIERRKELHNEWEKNPKKPQNNAFFKEYKECCDAIDAYNWHKNKTTLVYVNELHHLLIEILGRYVGYVAIADRDFQCMANQYFKHSGITERVEYWGDNRLKSIKKLDTFLKKEGLFVSEKNARNHIAHLNYLSLKSECTLLYLSERLREIFKYDRKLKNAVSKSLIDILDRHGMSVVFANLKENKHRLVIKSLEPKKLRHLGEKKIDNGYIETNQVSEEYCGIVKRLLEI

SEQ ID NO: 32 - protein, 1124 aa, Artificial Sequence
  Chemically Synthesized
MEDDKKTTGSISYELKDKHFWAAFLNLARHNVYITINHINKLLEIREIDNDEKVLDIKTLWQKGNKDLNQKARLRELMTKHFPFLETAIYTKNKEDKKEVKQEKQAEAQSLESLKDCLFLFLDKLQEARNYYSHYKYSEFSKEPEFEEGLLEKMYNIFGNNIQLVINDYQHNKDINPDEDFKHLDRKGQFKYSFADNEGNITESGLLFFVSLFLEKKDAIWMQQKLNGFKDNLENKKKMTHEVFCRSRILMPKLRLESTQTQDWILLDMLNELIRCPKSLYERLQGDDREKFKVPFDPADEDYNAEQEPFKNTLIRHQDRFPYFVLRYFDYNEIFKNLRFQIDLGTYHFSIYKKLIGGQKEDRHLTHKLYGFERIQEFAKQNRPDEWKAIVKDLDTYETSNKRYISETTPHYHLENQKIGIRFRNGNKEIWPSLKTNDENNEKSKYKLDKQYQAEAFLSVHELLPMMFYYLLLKKEKPNNDEINASIVEGFIKREIRNIFKLYDAFANGEINNIDDLEKYCADKGIPKRHLPKQMVAILYDEHKDMVKEAKRKQKEMVKDTKKLLATLEKQTQKEKEDDGRNVKLLKSGEIARWLVNDMMRFQPVQKDNEGKPLNNSKANSTEYQMLQRSLALYNNEEKPTRYFRQVNLIESNNPHPFLKWTKWEECNNILTFYYSYLTKKIEFLNKLKPEDWKKNQYFLKLKEPKTNRETLVQGWKNGFNLPRGIFTEPIREWFKRHQNNSKEYEKVEALDRVGLVTKVIPLFFKEEYFKDKEENFKEDTQKEINDCVQPFYNFPYNVGNIHKPKEKDFLHREERIELWDKKKDKFKGYKEKIKSKKLTEKDKEEFRSYLEFQSWNKFERELRLVRNQDIVTWLLCKELIDKLKIDELNIEELKKLRLNNIDTDTAKKEKNNILNRVMPMELPVTVYEIDDSHKIVKDKPLHTIYIKEAETKLLKQGNFKALVKDRRLNGLFSFVKTNSEAESKRNPISKLRVEYELGEYQEARIEIIQDMLALEEKLINKYKDLPTNKFSEMLNSWLEGKDEADKARFQNDVDFLIAVRNAFSHNQYPMHNKIEFANIKPFSLYTANNSEEKGLGIANQLKDKTKETTDKIKKIEKPIETKE

SEQ ID NO: 33 - protein, 1127 aa, Artificial Sequence
  Chemically Synthesized
MQKQDKLFVDRKKNAIFAFPKYITIMENKEKPEPIYYELTDKHFWAAFLNLARHNVYTTINHINRRLEIAELKDDGYMMGIKGSWNEQAKKLDKKVRLRDLIMKHFPFLEAAAYEMTNSKSPNNKEQREKEQSEALSLNNLKNVLFIFLEKLQVLRNYYSHYKYSEESPKPIFETSLLKNMYKVFDANVRLVKRDYMHHENIDMQRDFTHLNRKKQVGRTKNIIDSPNFHYHFADKEGNMTIAGLLFFVSLFLDKKDAIWMQKKLKGFKDGRNLREQMTNEVFCRSRISLPKLKLENVQTKDWMQLDMLNELVRCPKSLYERLREKDRESFKVPFDIFSDDYNAEEEPFKNTLVRHQDRFPYFVLRYFDLNEIFEQLRFQIDLGTYHFSIYNKRIGDEDEVRHLTHHLYGFARIQDFAPQNQPEEWRKLVKDLDHFETSQEPYISKTAPHYHLENEKIGIKFCSAHNNLFPSLQTDKTCNGRSKFNLGTQFTAEAFLSVHELLPMMFYYLLLTKDYSRKESADKVEGIIRKEISNIYAIYDAFANNEINSIADLTRRLQNTNILQGHLPKQMISILKGRQKDMGKEAERKIGEMIDDTQRRLDLLCKQTNQKIRIGKRNAGLLKSGKIADWLVNDMMRFQPVQKDQNNIPINNSKANSTEYRMLQRALALFGSENFRLKAYFNQMNLVGNDNPHPFLAETQWEHQTNILSFYRNYLEARKKYLKGLKPQNWKQYQHFLILKVQKTNRNTLVTGWKNSFNLPRGIFTQPIREWFEKHNNSKRIYDQILSFDRVGFVAKAIPLYFAEEYKDNVQPFYDYPFNIGNRLKPKKRQFLDKKERVELWQKNKELFKNYPSEKKKTDLAYLDFLSWKKFERELRLIKNQDIVTWLMFKELFNMATVEGLKIGEIHLRDIDTNTANEESNNILNRIMPMKLPVKTYETDNKGNILKERPLATFYIEETETKVLKQGNFKALVKDRRLNGLFSFAETTDLNLEEHPISKLSVDLELIKYQTTRISIFEMTLGLEKKLIDKYSTLPTDSFRNMLERWLQCKANRPELKNYVNSLIAVRNAFSHNQYPMYDATLFAEVKKFTLFPSVDTKKIELNIAPQLLEIVGKAIKEIEKSENKN

SEQ ID NO: 34 - protein, 1119 aa, Artificial Sequence
  Chemically Synthesized
MTEQNEKPYNGTYYTLEDKHFWAAFLNLARHNAYITLAHIDRQLAYSKADITNDEDILFFKGQWKNLDNDLERKARLRSLILKHFSFLEGAAYGKKLFESQSSGNKSSKKKELSKKEKEELQANALSLDNLKSILFDFLQKLKDFRNYYSHYRHPESSELPLFDGNMLQRLYNVFDVSVQRVKRDHEHNDKVDPHRHFNHLVRKGKKDKYGNNDNPFFKHHFVDREGTVTEAGLLFFVSLFLEKRDAIWMQKKIRGFKGGTEAYQQMTNEVFCRSRISLPKLKLESLRTDDWMLLDMLNELVRCPKSLYDRLREEDRARFRVPVDILSDEDDTDGTEEDPFKNTLVRHQDRFPYFALRYFDLKKVFTSLRFHIDLGTYHFAIYKKNIGEQPEDRHLTRNLYGFGRIQDFAEEHRPEEWKRLVRDLDYFETGDKPYITQTTPHYHIEKGKIGLRFVPEGQHLWPSPEVGATRTGRSKYAQDKRLTAEAFLSVHELMPMMFYYFLLREKYSEEVSAEKVQGRIKRVIEDVYAVYDAFARDEINTRDELDACLADKGIRRGHLPRQMIAILSQEHKDMEEKVRKKLQEMIADTDHRLDMLDRQTDRKIRIGRKNAGLPKSGVVADWLVRDMMRFQPVAKDTSGKPLNNSKANSTEYRMLQRALALFGGEKERLTPYFRQMNLTGGNNPHPFLHETRWESHTNILSFYRSYLEARKAFLQSIGRSDRVENHRFLLLKEPKTDRQTLVAGWKGEFHLPRGIFTEAVRDCLIEMGYDEVGSYKEVGFMAKAVPLYFERASKDRVQPFYDYPFNVGNSLKPKKGRFLSKEKRAEEWESGKERFRLAKLKKEILEAKEHPYHDFKSWQKFERELRLVKNQDIITWMMCRDLMEENKVEGLDTGTLYLKDIRTDVQEQGSLNVLNRVKPMRLPVVVYRADSRGHVHKEQAPLATVYIEERDTKLLKQGNFKSFVKDRRLNGLFSFVDTGALAMEQYPISKLRVEYELAKYQTARVCAFEQTLELEESLLTRYPHLPDKNFRKMLESWSDPLLDKWPDLHGNVRLLIAVRNAFSHNQYPMYDETLFSSIRKYDPSSPDAIEERMGLNIAHRLSEEVKQAKEMVERIIQA

SEQ ID NO: 35 - protein, 1175 aa, Artificial Sequence
  Chemically Synthesized
MTEQSERPYNGTYYTLEDKHFWAAFLNLARHNAYITLTHIDRQLAYSKADITNDQDVLSFKALWKNFDNDLERKSRLRSLILKHFSFLEGAAYGKKLFESKSSGNKSSKNKELTKKEKEELQANALSLDNLKSILFDFLQKLKDFRNYYSHYRHSGSSELPLFDGNMLQRLYNVFDVSVQRVKIDHEHNDEVDPHYHFNHLVRKGKKDRYGHNDNPSFKHHFVDGEGMVTEAGLLFFVSLFLEKRDAIWMQKKIRGFKGGTETYQQMTNEVFCRSRISLPKLKLESLRMDDWMLLDMLNELVRCPKPLYDRLREDDRACFRVPVDILPDEDDTDGGGEDPFKNTLVRHQDRFPYFALRYFDLKKVFTSLRFHIDLGTYHFAIYKKMIGEQPEDRHLTRNLYGFGRIQDFAEEHRPEEWKRLVRDLDYFETGDKPYISQTSPHYHIEKGKIGLRFMPEGQHLWPSPEVGTTRTGRSKYAQDKRLTAEAFLSVHELMPMMFYYFLLREKYSEEVSAERVQGRIKRVIEDVYAVYDAFARDEINTRDELDACLADKGIRRGHLPRQMIAILSQEHKDMEEKIRKKLQEMMADTDHRLDMLDRQTDRKIRIGRKNAGLPKSGVIADWLVRDMMRFQPVAKDASGKPLNNSKANSTEYRMLQRALALFGGEKERLTPYFRQMNLTGGNNPHPFLHETRWESHTNILSFYRSYLRARKAFLERIGRSDRVENRPFLLLKEPKTDRQTLVAGWKGEFHLPRGIFTEAVRDCLIEMGHDEVASYKEVGFMAKAVPLYFERACEDRVQPFYDSPFNVGNSLKPKKGRFLSKEERAEEWERGKERFRDLEAWSYSAARRIEDAFAGIEYASPGNKKKIEQLLRDLSLWEAFESKLKVRADRINLAKLKKEILEAQEHPYHDFKSWQKFERELRLVKNQDIITWMMCRDLMEENKVEGLDTGTLYLKDIRPNVQEQGSLNVLNRVKPMRLPVVVYRADSRGHVHKEEAPLATVYIEERDTKLLKQGNFKSFVKDRRLNGLFSFVDTGGLAMEQYPISKLRVEYELAKYQTARVCVFELTLRLEESLLTRYPHLPDESFREMLESWSDPLLAKWPELHGKVRLLIAVRNAFSHNQYPMYDEAVFSSIRKYDPSSPDAIEERMGLNIAHRLSEEVKQAKETVERIIQA

SEQ ID NO: 36 - protein, 1120 aa, Artificial Sequence
  Chemically Synthesized
MEDDKKTTDSIRYELKDKHFWAAFLNLARHNVYITVNHINKILEEDEINRDGYENTLENSWNEIKDINKKDRLSKLIIKHFPFLEATTYRQNPTDTTKQKEEKQAEAQSLESLKKSFFVFIYKLRDLRNHYSHYKHSKSLERPKFEEDLQNKMYNIFDVSIQFVKEDYKHNTDINPKKDFKHLDRKRKGKFHYSFADNEGNITESGLLFFVSLFLEKKDAIWVQKKLEGFKCSNKSYQKMTNEVFCRSRMLLPKLRLESTQTQDWILLDMLNELIRCPKSLYERLQGVNRKKFYVSFDPADEDYDAEQEPFKNTLVRHQDRFPYFALRYFDYNEVFANLRFQIDLGTYHFSIYKKLIGGQKEDRHLTHKLYGFERIQEFDKQNRPDEWKAIVKDSDTFKKKEEKEEEKPYISETTPHYHLENKKIGIAFKNHNIWPSTQTELTNNKRKKYNLGTSIKAEAFLSVHELLPMMFYYLLLKTENTKNDNKVGGKKETKKQGKHKIEAIIESKIKDIYALYDAFANGEINSEDELKEYLKGKDIKIVHLPKQMIAILKNEHKDMAEKAEAKQEKMKLATENRLKTLDKQLKGKIQNGKRYNSAPKSGEIASWLVNDMMRFQPVQKDENGESLNNSKANSTEYQLLQRTLAFFGSEHERLAPYFKQTKLIESSNPHPFLNDTEWEKCSNILSFYRSYLKARKNFLESLKPEDWEKNQYFLMLKEPKTNRETLVQGWKNGFNLPRGFFTEPIRKWFMEHWKSIKVDDLKRVGLVAKVTPLFFSEKYKDSVQPFYNYPFNVGDVNKPKEEDFLHREERIELWDKKKDKFKGYKAKKKFKEMTDKEKEEHRSYLEFQSWNKFERELRLVRNQDIVTWLLCTELIDKLKIDELNIKELKKLRLKDINTDTAKKEKNNILNRVMPMELPVTVYKVNKGGYIIKNKPLHTIYIKEAETKLLKQGNFKALVKDRRLNGLFSFVKTPSEAESESNPISKLRVEYELGKYQNARLDIIEDMLALEKKLIDKYNSLDTDNFHNMLTGWLELKGEAKKARFQNDVKLLTAVRNAFSHNQYPMYDENLFGNIERFSLSSSNIIESKGLDIAAKLKEEVSKAAKKIQNEEDNKKEKET

SEQ ID NO: 37 - protein, 1132 aa, Artificial Sequence
  Chemically Synthesized
MEDDKKTKESTNMLDNKHFWAAFLNLARHNVYITVNHINKVLELKNKKDQDIIIDNDQDILAIKTHWEKVNGDLNKTERLRELMTKHFPFLETAIYTKNKEDKEEVKQEKQAKAQSFDSLKHCLFLFLEKLQEARNYYSHYKYSESTKEPMLEKELLKKMYNIFDDNIQLVIKDYQHNKDINPDEDFKHLDRTEEEFNYYFTTNKKGNITASGLLFFVSLFLEKKDAIWMQQKLRGFKDNRESKKKMTHEVFCRSRMLLPKLRLESTQTQDWILLDMLNELIRCPKSLYERLQGEYRKKFNVPFDSADEDYDAEQEPFKNTLVRHQDRFPYFALRYFDYNEIFTNLRFQIDLGTYHFSIYKKLIGGQKEDRHLTHKLYGFERIQEFAKQNRTDEWKAIVKDFDTYETSEEPYISETAPHYHLENQKIGIRFRNDNDEIWPSLKTNGENNEKRKYKLDKQYQAEAFLSVHELLPMMFYYLLLKKEEPNNDKKNASIVEGFIKREIRDIYKLYDAFANGEINNIDDLEKYCEDKGIPKRHLPKQMVAILYDEHKDMAEEAKRKQKEMVKDTKKLLATLEKQTQGEIEDGGRNIRLLKSGEIARWLVNDMMRFQPVQKDNEGNPLNNSKANSTEYQMLQRSLALYNKEEKPTRYFRQVNLINSSNPHPFLKWTKWEECNNILSFYRSYLTKKIEFLNKLKPEDWEKNQYFLKLKEPKTNRETLVQGWKNGFNLPRGIFTEPIREWFKRHQNDSEEYEKVETLDRVGLVTKVIPLFFKKEDSKDKEEYLKKDAQKEINNCVQPFYGFPYNVGNIHKPDEKDFLPSEERKKLWGDKKYKFKGYKAKVKSKKLTDKEKEEYRSYLEFQSWNKFERELRLVRNQDIVTWLLCTELIDKLKVEGLNVEELKKLRLKDIDTDTAKQEKNNILNRVMPMQLPVTVYEIDDSHNIVKDRPLHTVYIEETKTKLLKQGNFKALVKDRRLNGLFSFVDTSSETELKSNPISKSLVEYELGEYQNARIETIKDMLLLEETLIEKYKTLPTDNFSDMLNGWLEGKDEADKARFQNDVKLLVAVRNAFSHNQYPMRNRIAFANINPFSLSSADTSEEKKLDIANQLKDKTHKIIKRIIEIEKPIETKE

SEQ ID NO: 38 - protein, 1126 aa, Artificial Sequence
  Chemically Synthesized
MEDDKKTTDSIRYELKDKHFWAAFLNLARHNVYITVNHINKILEEGEINRDGYETTLKNTWNEIKDINKKDRLSKLIIKHFPFLEAATYRLNPTDTTKQKEEKQAEAQSLESLRKSFFVFIYKLRDLRNHYSHYKHSKSLERPKFEEGLLEKMYNIFNASIRLVKEDYQYNKDINPDEDFKHLDRTEEEFNYYFTKDNEGNITESGLLFFVSLFLEKKDAIWMQQKLRGFKDNRENKKKMTNEVFCRSRMLLPKLRLQSTQTQDWILLDMLNELIRCPKSLYERLREEDREKFRVPIEIADEDYDAEQEPFKNTLVRHQDRFPYFALRYFDYNEIFTNLRFQIDLGTYHFSIYKKQIGDYKESHHLTHKLYGFERIQEFTKQNRPDEWRKFVKTFNSFETSKEPYIPETTPHYHLENQKIGIRFRNDNDKIWPSLKTNSEKNEKSKYKLDKSFQAEAFLSVHELLPMMFYYLLLKTENTDNDNEIETKKKENKNDKQEKHKIEEIIENKITEIYALYDTFANGEIKSIDELEEYCKGKDIEIGHLPKQMIAILKDEHKVMATEAERKQEEMLVDVQKSLESLDNQINEEIENVERKNSSLKSGKIASWLVNDMMRFQPVQKDNEGKPLNNSKANSTEYQLLQRTLAFFGSEHERLAPYFKQTKLIESSNPHPFLKDTEWEKCNNILSFYRSYLEAKKNFLESLKPEDWEKNQYFLKLKEPKTKPKTLVQGWKNGFNLPRGIFTEPIRKWFMKHRENITVAELKRVGLVAKVIPLFFSEEYKDSVQPFYNYHFNVGNINKPDEKNFLNCEERRELLRKKKDEFKKMTDKEKEENPSYLEFKSWNKFERELRLVRNQDIVTWLLCMELFNKKKIKELNVEKIYLKNINTNTTKKEKNTEEKNGEEKNIKEKNNILNRIMPMRLPIKVYGRENFSKNKKKKIRRNTFFTVYIEEKGTKLLKQGNFKALERDRRLGGLFSFVKTPSKAESKSNTISKLRVEYELGEYQKARIEIIKDMLALEKTLIDKYNSLDTDNFNKMLTDWLELKGEPDKASFQNDVDLLIAVRNAFSHNQYPMRNRIAFANINPFSLSSANTSEEKGLGIANQLKDKTHKTIEKIIEIEKPIETKE

SEQ ID NO: 39 - protein, 1154 aa, Artificial Sequence
  Chemically Synthesized
MRVSKVKVKDGGKDKMVLVHRKTTGAQLVYSGQPVSNETSNILPEKKRQSFDLSTLNKTIIKFDTAKKQKLNVDQYKIVEKIFKYPKQELPKQIKAEEILPFLNHKFQEPVKYWKNGKEESFNLTLLIVEAVQAQDKRKLQPYYDWKTWYIQTKSDLLKKSIENNRIDLTENLSKRKKALLAWETEFTASGSIDLTHYHKVYMTDVLCKMLQDVKPLTDDKGKINTNAYHRGLKKALQNHQPAIFGTREVPNEANRADNQLSIYHLEVVKYLEHYFPIKTSKRRNTADDIAHYLKAQTLKTTIEKQLVNAIRANIIQQGKTNHHELKADTTSNDLIRIKTNEAFVLNLTGTCAFAANNIRNMVDNEQTNDILGKGDFIKSLLKDNTNSQLYSFFFGEGLSTNKAEKETQLWGIRGAVQQIRNNVNHYKKDALKTVFNISNFENPTITDPKQQTNYADTIYKARFINELEKIPEAFAQQLKTGGAVSYYTIENLKSLLTTFQFSLCRSTIPFAPGFKKVFNGGINYQNAKQDESFYELMLEQYLRKENFAEESYNARYFMLKLIYNNLFLPGFTTDRKAFADSVGFVQMQNKKQAEKVNPRKKEAYAFEAVRPMTAADSIADYMAYVQSELMQEQNKKEEKVAEETRINFEKFVLQVFIKGFDSFLRAKEFDFVQMPQPQLTATASNQQKADKLNQLEASITADCKLTPQYAKADDATHIAFYVFCKLLDAAHLSNLRNELIKFRESVNEFKFHHLLEIIEICLLSADVVPTDYRDLYSSEADCLARLRPFIEQGADITNWSDLFVQSDKHSPVIHANIELSVKYGTTKLLEQIINKDTQFKTTEANFTAWNTAQKSIEQLIKQREDHHEQWVKAKNADDKEKQERKREKSNFAQKFIEKHGDDYLDICDYINTYNWLDNKMHFVHLNRLHGLTIELLGRMAGFVALFDRDFQFFDEQQIADEFKLHGFVNLHSIDKKLNEVPTKKIKEIYDIRNKIIQINGNKINESVRANLIQFISSKRNYYNNAFLHVSNDEIKEKQMYDIRNHIAHFNYLTKDAADFSLIDLINELRELLHYDRKLKNAVSKAFIDLFDKHGMILKLKLNADHKLKVESLEPKKIYHLGSSAKDKPEYQYCTNQVMMAYCNMCRSLLEMKK

SEQ ID NO: 40 - protein, 1151 aa, Artificial Sequence
  Chemically Synthesized
MEDKPFWAAFFNLARHNVYLTVNHINKLLDLEKLYDEGKHKEIFEREDIFNISDDVMNDANSNGKKRKLDIKKIWDDLDTDLTRKYQLRELILKHFPFIQPAIIGAQTKERTTIDKDKRSTSTSNDSLKQTGEGDINDLLSLSNVKSMFFRLLQILEQLRNYYSHVKHSKSATMPNFDEDLLNWMRYIFIDSVNKVKEDYSSNSVIDPNTSFSHLIYKDEQGKIKPCRYPFTSKDGSINAFGLLFFVSLFLEKQDSIWMQKKIPGFKKASENYMKMTNEVFCRNHILLPKIRLETVYDKDWMLLDMLNEVVRCPLSLYKRLTPAAQNKFKVPEKSSDNANRQEDDNPFSRILVRHQNRFPYFVLRFFDLNEVFTTLRFQINLGCYHFAICKKQIGDKKEVHHLIRTLYGFSRLQNFTQNTRPEEWNTLVKTTEPSSGNDGKTVQGVPLPYISYTIPHYQIENEKIGIKIFDGDTAVDTDIWPSVSTEKQLNKPDKYTLTPGFKADVFLSVHELLPMMFYYQLLLCEGMLKTDAGNAVEKVLIDTRNAIFNLYDAFVQEKINTITDLENYLQDKPILIGHLPKQMIDLLKGHQRDMLKAVEQKKAMLIKDTERRLKLLDKQLKQETDVAAKNTGTLLKNGQIADWLVNDMMRFQPVKRDKEGNPINCSKANSTEYQMLQRAFAFYATDSCRLSRYFTQLHLIHSDNSHLFLSRFEYDKQPNLIAFYAAYLKAKLEFLNELQPQNWASDNYFLLLRAPKNDRQKLAEGWKNGFNLPRGLFTEKIKTWFNEHKTIVDISDCDIFKNRVGQVARLIPVFFDKKFKDHSQPFYRYDFNVGNVSKPTEANYLSKGKREELFKSYQNKFKNNIPAEKTKEYREYKNFSLWKKFERELRLIKNQDILIWLMCKNLFDEKIKPKKDILEPRIAVSYIKLDSLQTNTSTAGSLNALAKVVPMTLAIHIDSPKPKGKAGNNEKENKEFTVYIKEEGTKLLKWGNFKTLLADRRIKGLFSYIEHDDIDLKQHPLTKRRVDLELDLYQTCRIDIFQQTLGLEAQLLDKYSDLNTDNFYQMLIGWRKKEGIPRNIKEDTDFLKDVRNAFSHNQYPDSKKIAFRRIRKFNPKELILEEEEGLGIATQMYKEVEKVVNRIKRIELFD

SEQ ID NO: 41 - protein, 1322 aa, Artificial Sequence
  Chemically Synthesized
MSKECKKQRQEKKRRLQKANFSISLTGKHVFGAYFNMARTNFVKTINYILPIAGVRGNYSENQINKMLHALFLIQAGRNEELTTEQKQWEKKLRLNPEQQTKFQKLLFKHFPVLGPMMADVADHKAYLNKKKSTVQTEDETFAMLKGVSLADCLDIICLMADTLTECRNFYTHKDPYNKPSQLADQYLHQEMIAKKLDKVVVASRRILKDREGLSVNEVEFLTGIDHLHQEVLKDEFGNAKVKDGKVMKTFVEYDDFYFKISGKRLVNGYTVTTKDDKPVNVNTMLPALSDFGLLYFCVLFLSKPYAKLFIDEVRLFEYSPFDDKENMIMSEMLSIYRIRTPRLHKIDSHDSKATLAMDIFGELRRCPMELYNLLDKNAGQPFFHDEVKHPNSHTPDVSKRLRYDDRFPTLALRYIDETELFKRIRFQLQLGSFRYKFYDKENCIDGRVRVRRIQKEINGYGRMQEVADKRMDKWGDLIQKREERSVKLEHEELYINLDQFLEDTADSTPYVTDRRPAYNIHANRIGLYWEDSQNPKQYKVFDENGMYIPELVVTEDKKAPIKMPAPRCALSVYDLPAMLFYEYLREQQDNEFPSAEQVIIEYEDDYRKFFKAVAEGKLKPFKRPKEFRDFLKKEYPKLRMADIPKKLQLFLCSHGLCYNNKPETVYERLDRLTLQHLEERELHIQNRLEHYQKDRDMIGNKDNQYGKKSFSDVRHGALARYLAQSMMEWQPTKLKDKEKGHDKLTGLNYNVLTAYLATYGHPQVPEEGFTPRTLEQVLINAHLIGGSNPHPFINKVLALGNRNIEELYLHYLEEELKHIRSRIQSLSSNPSDKALSALPFIHHDRMRYHERTSEEMMALAARYTTIQLPDGLFTPYILEILQKHYTENSDLQNALSQDVPVKLNPTCNAAYLITLFYQTVLKDNAQPFYLSDKTYTRNKDGEKAESFSFKRAYELFSVLNNNKKDTFPFEMIPLFLTSDEIQERLSAKLLDGDGNPVPEVGEKGKPATDSQGNTIWKRRIYSEVDDYAEKLTDRDMKISFKGEWEKLPRWKQDKIIKRRDETRRQMRDELLQRMPRYIRDIKDNERTLRRYKTQDMVLFLLAEKMFTNIISEQSSEFNWKQMRLSKVCNEAFLRQTLTFRVPVTVGETTIYVEQENMSLKNYGEFYRFLTDDRLMSLLNNIVETLKPNENGDLVIRHTDLMSELAAYDQYRSTIFMLIQSIENLIITNNAVLDDPDADGFWVREDLPKRNNFASLLELINQLNNVELTDDERKLLVAIRNAFSHNSYNIDFSLIKDVKHLPEVAKGILQHLQSMLGVEITK

SEQ ID NO: 42 - protein, 1095 aa, Artificial Sequence
  Chemically Synthesized
MEKPLLPNVYTLKHKFFWGAFLNIARHNAFITICHINEQLGLKTPSNDDKIVDVVCETWNNILNNDHDLLKKSQLTELILKHFPFLTAMCYHPPKKEGKKKGHQKEQQKEKESEAQSQAEALNPSKLIEALEILVNQLHSLRNYYSHYKHKKPDAEKDIFKHLYKAFDASLRMVKEDYKAHFTVNLTRDFAHLNRKGKNKQDNPDFNRYRFEKDGFFTESGLLFFTNLFLDKRDAYWMLKKVSGFKASHKQREKMTTEVFCRSRILLPKLRLESRYDHNQMLLDMLSELSRCPKLLYEKLSEENKKHFQVEADGFLDEIEEEQNPFKDTLIRHQDRFPYFALRYLDLNESFKSIRFQVDLGTYHYCIYDKKIGDEQEKRHLTRTLLSFGRLQDFTEINRPQEWKALTKDLDYKETSNQPFISKTTPHYHITDNKIGFRLGTSKELYPSLEIKDGANRIAKYPYNSGFVAHAFISVHELLPLMFYQHLTGKSEDLLKETVRHIQRIYKDFEEERINTIEDLEKANQGRLPLGAFPKQMLGLLQNKQPDLSEKAKIKIEKLIAETKLLSHRLNTKLKSSPKLGKRREKLIKTGVLADWLVKDFMRFQPVAYDAQNQPIKSSKANSTEFWFIRRALALYGGEKNRLEGYFKQTNLIGNTNPHPFLNKFNWKACRNLVDFYQQYLEQREKFLEAIKNQPWEPYQYCLLLKIPKENRKNLVKGWEQGGISLPRGLFTEAIRETLSEDLMLSKPIRKEIKKHGRVGFISRAITLYFKEKYQDKHQSFYNLSYKLEAKAPLLKREEHYEYWQQNKPQSPTESQRLELHTSDRWKDYLLYKRWQHLEKKLRLYRNQDVMLWLMTLELTKNHFKELNLNYHQLKLENLAVNVQEADAKLNPLNQTLPMVLPVKVYPATAFGEVQYHKTPIRTVYIREEHTKALKMGNFKALVKDRRLNGLFSFIKEENDTQKHPISQLRLRRELEIYQSLRVDAFKETLSLEEKLLNKHTSLSSLENEFRALLEEWKKEYAASSMVTDEHIAFIASVRNAFCHNQYPFYKEALHAPIPLFTVAQPTTEEKDGLGIAEALLKVLREYCEIVKSQI

SEQ ID NO: 43 - protein, 1285 aa, Artificial Sequence
  Chemically Synthesized
MQIGKVQGRTISEFGDPAGGLKRKISTDGKNRKELPAHLSSDPKALIGQWISGIDKIYRKPDSRKSDGKAIHSPTPSKMQFDARDDLGEAFWKLVSEAGLAQDSDYDQFKRRLHPYGDKFQPADSGAKLKFEADPPEPQAFHGRWYGAMSKRGNDAKELAAALYEHLHVDEKRIDGQPKRNPKTDKFAPGLVVARALGIESSVLPRGMARLARNWGEEEIQTYFVVDVAASVKEVAKAAVSAAQAFDPPRQVSGRSLSPKVGFALAEHLERVTGSKRCSFDPAAGPSVLALHDEVKKTYKRLCARGKNAARAFPADKTELLALMRHTHENRVRNQMVRMGRVSEYRGQQAGDLAQSHYWTSAGQTEIKESEIFVRLWVGAFALAGRSMKAWIDPMGKIVNTEKNDRDLTAAVNIRQVISNKEMVAEAMARRGIYFGETPELDRLGAEGNEGFVFALLRYLRGCRNQTFHLGARAGFLKEIRKELEKTRWGKAKEAEHVVLTDKTVAAIRAIIDNDAKALGARLLADLSGAFVAHYASKEHFSTLYSEIVKAVKDAPEVSSGLPRLKLLLKRADGVRGYVHGLRDTRKHAFATKLPPPPAPRELDDPATKARYIALLRLYDGPFRAYASGITGTALAGPAARAKEAATALAQSVNVTKAYSDVMEGRSSRLRPPNDGETLREYLSALTGETATEFRVQIGYESDSENARKQAEFIENYRRDMLAFMFEDYIRAKGFDWILKIEPGATAMTRAPVLPEPIDTRGQYEHWQAALYLVMHFVPASDVSNLLHQLRKWEALQGKYELVQDGDATDQADARREALDLVKRFRDVLVLFLKTGEARFEGRAAPFDLKPFRALFANPATFDRLFMATPTTARPAEDDPEGDGASEPELRVARTLRGLRQIARYNHMAVLSDLFAKHKVRDEEVARLAEIEDETQEKSQIVAAQELRTDLHDKVMKCHPKTISPEERQSYAAAIKTIEEHRFLVGRVYLGDHLRLHRLMMDVIGRLIDYAGAYERDTGTFLINASKQLGAGADWAVTIAGAANTDARTQTRKDLAHFNVLDRADGTPDLTALVNRAREMMAYDRKRKNAVPRSILDMLARLGLTLKWQMKDHLLQDATITQAAIKHLDKVRLTVGGPAAVTEARFSQDYLQMVAAVFNGSVQNPKPRRRDDGDAWHKPPKPATAQSQPDQKPPNKAPSAGSRLPPPQVGEVYEGVVVKVIDTGSLGFLAVEGVAGNIGLHISRLRRIREDAIIVGRRYRFRVEIYVPPKSNTSKLNAADLVRID

SEQ ID NO: 44 - protein, 1285 aa, Artificial Sequence; identical to SEQ ID NO: 43
  Chemically Synthesized

SEQ ID NO: 45 - protein, 1285 aa, Artificial Sequence
  Chemically Synthesized
MQIGKVQGRTISEFGDPAGGLKRKISTDGKNRKELPAHLSSDPKALIGQWISGIDKIYRKPDSRKSDGKAIHSPTPSKMQFDARDDLGEAFWKLVSEAGLAQDSDYDQFKRRLHPYGDKFQPADSGAKLKFEADPPEPQAFHGRWYGAMSKRGNDAKELAAALYEHLHVDEKRIDGQPKRNPKTDKFAPGLVVARALGIESSVLPRGMARLARNWGEEEIQTYFVVDVAASVKEVAKAAVSAAQAFDPPRQVSGRSLSPKVGFALAEHLERVTGSKRCSFDPAAGPSVLALHDEVKKTYKRLCARGKNAARAFPADKTELLALMRHTHENRVRNQMVRMGRVSEYRGQQAGDLAQSHYWTSAGQTEIKESEIFVRLWVGAFALAGRSMKAWIDPMGKIVNTEKNDRDLTAAVNIRQVISNKEMVAEAMARRGIYFGETPELDRLGAEGNEGFVFALLRYLRGCRNQTFHLGARAGFLKEIRKELEKTRWGKAKEAEHVVLTDKTVAAIRAIIDNDAKALGARLLADLSGAFVAHYASKEHFSTLYSEIVKAVKDAPEVSSGLPRLKLLLKRADGVRGYVHGLRDTRKHAFATKLPPPPAPRELDDPATKARYIALLRLYDGPFRAYASGITGTALAGPAARAKEAATALAQSVNVTKAYSDVMEGRTSRLRPPNDGETLREYLSALTGETATEFRVQIGYESDSENARKQAEFIENYRRDMLAFMFEDYIRAKGFDWILKIEPGATAMTRAPVLPEPIDTRGQYEHWQAALYLVMHFVPASDVSNLLHQLRKWEALQGKYELVQDGDATDQADARREALDLVKRFRDVLVLFLKTGEARFEGRAAPFDLKPFRALFANPATFDRLFMATPTTARPAEDDPEGDGASEPELRVARTLRGLRQIARYNHMAVLSDLFAKHKVRDEEVARLAEIEDETQEKSQIVAAQELRTDLHDKVMKCHPKTISPEERQSYAAAIKTIEEHRFLVGRVYLGDHLRLHRLMMDVIGRLIDYAGAYERDTGTFLINASKQLGAGADWAVTIAGAANTDARTQTRKDLAHFNVLDRADGTPDLTALVNRAREMMAYDRKRKNAVPRSILDMLARLGLTLKWQMKDHLLQDATITQAAIKHLDKVRLTVGGPAAVTEARFSQDYLQMVAAVFNGSVQNPKPRRRDDGDAWHKPPKPATAQSQPDQKPPNKAPSAGSRLPPPQVGEVYEGVVVKVIDTGSLGFLAVEGVAGNIGLHISRLRRIREDAIIVGRRYRFRVEIYVPPKSNTSKLNAADLVRID

SEQ ID NO: 46 - protein, 922 aa, Artificial Sequence
  Chemically Synthesized
MAKKNKMKPRELREAQKKARQLKAAEINNNAAPAIAAMPAAEVIAPVAEKKKSSVKAAGMKSILVSENKMYITSFGKGNSAVLEYEVDNNDYNKTQLSSKDNSNIELGDVNEVNITFSSKHGFGSGVEINTSNPTHRSGESSPVRGDMLGLKSELEKRFFGKTFDDNIHIQLIYNILDIEKILAVYVTNIVYALNNMLGIKDSESYDDFMGYLSARNTYEVFTHPDKSNLSDKVKGNIKKSLSKFNDLLKTKRLGYFGLEEPKTKDTRASEAYKKRVYHMLAIVGQIRQCVFHDKSGAKRFDLYSFINNIDPEYRDTLDYLVEERLKSINKDFIEGNKVNISLLIDMMKGYEADDIIRLYYDFIVLKSQKNLGFSIKKLREKMLEEYGFRFKDKQYDSVRSKMYKLMDFLLFCNYYRNDVAAGEALVRKLRFSMTDDEKEGIYADEAAKLWGKFRNDFENIADHMNGDVIKELGKADMDFDEKILDSEKKNASDLLYFSKMIYMLTYFLDGKEINDLLTTLISKFDNIKEFLKIMKSSAVDVECELTAGYKLFNDSQRITNELFIVKNIASMRKPAASAKLTMFRDALTILGIDDNITDDRISEILKLKEKGKGIHGLRNFITNNVIESSRFVYLIKYANAQKIREVAKNEKVVMFVLGGIPDTQIERYYKSCVEFPDMNSSLEAKRSELARMIKNISFDDFKNVKQQAKGRENVAKERAKAVIGLYLTVMYLLVKNLVNVNARYVIAIHCLERDFGLYKEIIPELASKNLKNDYRILSQTLCELCDDRNESSNLFLKKNKRLRKCVEVDINNADSSMTRKYRNCIAHLTVVRELKEYIGDIRTVDSYFSIYHYVMQRCITKRGDDTKQEEKIKYEDDLLKNHGYTKDFVKALNSPFGYNIPRFKNLSIEQLFDRNEYLTEK

SEQ ID NO: 47 - protein, 1089 aa, Artificial Sequence
  Chemically Synthesized
NIPALVENQKKYFGTYSVMAMLNAQTVLDHIQKVADIEGEQNENNENLWFHPVMSHLYNAKNGYDKQPEKTMFIIERLQSYFPFLKIMAENQREYSNGKYKQNRVEVNSNDIFEVLKRAFGVLKMYRDLTNAYKTYEEKLNDGCEFLTSTEQPLSGMINNYYTVALRNMNERYGYKTEDLAFIQDKRFKFVKDAYGKKKSQVNTGFFLSLQDYNGDTQKKLHLSGVGIALLICLFLDKQYINIFLSRLPIFSSYNAQSEERRIIIRSFGINSIKLPKDRIHSEKSNKSVAMDMLNEVKRCPDELFTTLSAEKQSRFRIISDDHNEVLMKRSSDRFVPLLLQYIDYGKLFDHIRFHVNMGKLRYLLKADKTCIDGQTRVRVIEQPLNGFGRLEEAETMRKQENGTFGNSGIRIRDFENMKRDDANPANYPYIVDTYTHYILENNKVEMFINDKEDSAPLLPVIEDDRYVVKTIPSCRMSTLEIPAMAFHMFLFGSKKTEKLIVDVHNRYKRLFQAMQKEEVTAENIASFGIAESDLPQKILDLISGNAHGKDVDAFIRLTVDDMLTDTERRIKRFKDDRKSIRSADNKMGKRGFKQISTGKLADFLAKDIVLFQPSVNDGENKITGLNYRIMQSAIAVYDSGDDYEAKQQFKLMFEKARLIGKGTTEPHPFLYKVFARSIPANAVEFYERYLIERKFYLTGLSNEIKKGNRVDVPFIRRDQNKWKTPAMKTLGRIYSEDLPVELPRQMFDNEIKSHLKSLPQMEGIDFNNANVTYLIAEYMKRVLDDDFQTFYQWNRNYRYMDMLKGEYDRKGSLQHCFTSVEEREGLWKERASRTERYRKQASNKIRSNRQMRNASSEEIETILDKRLSNSRNEYQKSEKVIRRYRVQDALLFLLAKKTLTELADFDGERFKLKEIMPDAEKGILSEIMPMSFTFEKGGKKYTITSEGMKLKNYGDFFVLASDKRIGNLLELVGSDIVSKEDIMEEFNKYDQCRPEISSIVFNLEKWAFDTYPELSARVDREEKVDFKSILKILLNNKNINKEQSDILRKIRNAFDANNYPDKGVVEIKALPEIAMSIKKAFGEYAIMK

SEQ ID NO: 48 - protein, 982 aa, Artificial Sequence
  Chemically Synthesized
NIPALVENQKKYFGTYSVMAMLNAQTVLDHIQKVADIEGEQNENNENLWFHPVMSHLYNAKNGYDKQPEKTMFIIERLQSYFPFLKIMAENQREYSNGKYKQNRVEVNSNDIFEVLKRAFGVLKMYRDLTNAYKTYEEKLNDGCEFLTSTEQPLSGMINNYYTVALRNMNERYGYKTEDLAFIQDKRFKFVKDAYGKKKSQVNTGFFLSLQDYNGDTQKKLHLSGVGIALLICLFLDKQYINIFLSRLPIFSSYNAQSEERRIIIRSFGINSIKLPKDRIHSEKSNKSVAMDMLNEVKRCPDELFTTLSAEKQSRFRIISDDHNEVLMKRSSDRFVPLLLQYIDYGKLFDHIRFHVNMGKLRYLLKADKTCIDGQTRVRVIEQPLNGFGRLEEAETMRKQENGTFGNSGIRIRDFENMKRDDANPANYPYIVDTYTHYILENNKVEMFINDKEDSAPLLPVIEDDRYVVKTIPSCRMSTLEIPAMAFHMFLFGSKKTEKLIVDVHNRYKRLFQAMQKEEVTAENIASFGIAESDLPQKILDLISGNAHGKDVDAFIRLTVDDMLTDTERRIKRFKDDRKSIRSADNKMGKRGFKQISTGKLADFLAKDIVLFQPSVNDGENKITGLNYRIMQSAIAVYDSGDDYEAKQQFKLMFEKARLIGKGTTEPHPFLYKVFARSIPANAVEFYERYLIERKFYLTGLSNEIKKGNRVDVPFIRRDQNKWKTPAMKTLGRIYSEDLPVELPRQMFDNEIKSHLKSLPQMEGIDFNNANVTYLIAEYMKRVLDDDFQTFYQWNRNYRYMDMLKGEYDRKGSLQHCFTSVEEREGLWKERASRTERYRKQASNKIRSNRQMRNASSEEIETILDKRLSNSRNEYQKSEKVIRRYRVQDALLFLLAKKTLTELADFDGERFKLKEIMPDAEKGILSEIMPMSFTFEKGGKKYTITSEGMKLKNYGDFFVLASDKRIGNLLELVGSDIVSKED

SEQ ID NO: 49 - protein, 128 aa, Artificial Sequence
  Chemically Synthesized
KESRAKKFQRQHMDSDSSPSSSSTYCNQMMRRRNMTQGRCKPVNTFVHEPLVDVQNVCFQEKVTCKNGQGNCYKSNSSMHITDCRLTNGSRYPNCAYRTSPKERHIIVACEGSPYVPVHFDASVEDST

SEQ ID NO: 50 - protein, 134 aa, Artificial Sequence
  Chemically Synthesized
KPPQFTWAQWFETQHINMTSQQCTNAMQVINNYQRRCKNQNTFLLTTFANVVNVCGNPNMTCPSNKTRKNCHHSGSQVPLIHCNLTTPSPQNISNCRYAQTPANMFYIVACDNRDQRRDPPQYPVVPVHLDRII

SEQ ID NO: 51 - protein, 133 aa, Artificial Sequence
  Chemically Synthesized
RPPQFTRAQWFAIQHISLNPPRCTIAMRAINNYRWRCKNQNTFLRTTFANVVNVCGNQSIRCPHNRTLNNCHRSRFRVPLLHCDLINPGAQNISNCTYADRPGRRFYVVACDNRDPRDSPRYPVVPVHLDTTI

SEQ ID NO: 52 - protein, 119 aa, Artificial Sequence
  Chemically Synthesized
QDGMYQRFLRQHVHPEETGGSDRYCNLMMQRRKMTLYHCKRFNTFIHEDIWNIRSICSTTNIQCKNGKMNCHEGVVKVTDCRDTGSSRAPNCRYRAIASTRRVVIACEGNPQVPVHFDG

SEQ ID NO: 53 - protein, 123 aa, Artificial Sequence [sequence omitted]

SEQ ID NO: 54 - protein, 127 aa, Artificial Sequence
  Chemically Synthesized
WPKRLTKAHWFEIQHIQPSPLQCNRAMSGINNYTQHCKHQNTFLHDSFQNVAAVCDLLSIVCKNRRHNCHQSSKPVNMTDCRLTSGKYPQCRYSAAAQYKFFIVACDPPQKSDPPYKLVPVHLDSIL

SEQ ID NO: 55 - protein, 128 aa, Artificial Sequence
  Chemically Synthesized
KPKGMTSSQWFKIQHMQPSPQACNSAMKNINKHTKRCKDLNTFLHEPFSSVAATCQTPKIACKNGDKNCHQSHGAVSLTMCKLTSGKHPNCRYKEKRQNKSYVVACKPPQKKDSQQFHLVPVHLDRVL

SEQ ID NO: 56 - protein, 127 aa, Artificial Sequence
  Chemically Synthesized
KPKDMTSSQWFKTQHVQPSPQACNSAMSIINKYTERCKDLNTFLHEPFSSVAITCQTPNIACKNSCKNCHQSHGPMSLTMGELTSGKYPNCRYKEKHLNTPYIVACDPPQQGDPGYPLVPVHLDKVV

SEQ ID NO: 57 - protein, 271 aa, Artificial Sequence
  Chemically Synthesized
KESRAKKFQRQHMDSDSSPSSSSTYCNQMMRRRNMTQGRCKPVNTFVHEPLVDVQNVCFQEKVTCKNGQGNCYKSNSSMHITDCRLTNGSRYPNCAYRTSPKERHIIVACEGSPYVPVHFDASVEDSTGGGGSGGGGSGGGGSKESRAKKFQRQHMDSDSSPSSSSTYCNQMMRRRNMTQGRCKPVNTFVHEPLVDVQNVCFQEKVTCKNGQGNCYKSNSSMHITDCRLTNGSRYPNCAYRTSPKERHIIVACEGSPYVPVHFDASVEDST

SEQ ID NO: 58 - protein, 124 aa, Artificial Sequence
  Chemically Synthesized
KETAAAKFERQHMDSSTSAASSSNYCNQMMKSRNLTKDRCKPVNTFVHESLADVQAVCSQKNVACKNGQTNCYQSYSTMSITDCRETGSSKYPNCAYKTTQANKHIIVACEGNPYVPVHFDASV

SEQ ID NO: 59 - protein, 245 aa, Artificial Sequence
  Chemically Synthesized
LALQAKQYGDFDRYVLALSWQTGFCQSQHDRNRNERDECRLQTETTNKADFLTVHGLWPGLPKSVAARGVDERRWMRFGCATRPIPNLPEARASRMCSSPETGLSLETAAKLSEVMPGAGGRSCLERYEYAKHGACFGFDPDAYFGTMVRLNQEIKESEAGKFLADNYGKTVSRRDFDAAFAKSWGKENVKAVKLTCQGNPAYLTEIQISIKADAINAPLSANSFLPQPHPGNCGKTFVIDKAGY

SEQ ID NO: 60 - protein, 128 aa, Artificial Sequence
  Chemically Synthesized
GESQAEKFQRQHMDSGSSPSSSSTYCNQMMKLRNMTQGWCKSVNTFVHEPLVDVQNVCFQEKVTCKNGQTNCFKSNSKMHITECRLTNGSKYPNCAYQTSPKERHIIVACEGSPYVPVHFDDSVEDST

SEQ ID NO: 61 - protein, 128 aa, Artificial Sequence
  Chemically Synthesized
KESRAKKFQRQHMDSDSSPSSSSTYCNQMMRRRNMTQGDCKPVNTFVHEPLVDVQNVCFQEKVTCKDGQGNCYKSNSSMHITDCRLTADSDYPNCAYRTSPKERHIIVACEGSPYVPVHFDASVEDST

SEQ ID NO: 62 - protein, 124 aa, Artificial Sequence; identical to SEQ ID NO: 58
  Chemically Synthesized

SEQ ID NO: 63 - protein, 104 aa, Artificial Sequence
  Chemically Synthesized
ACDYTCGSNCYSSSDVSTAQAAGYQLHEDGETVGSNSYPHKYNNYEGFDFSVSSPYYEWPILSSGDVYSGGSPGADRVVFNENNQLAGVITHTGASGNNFVECT

SEQ ID NO: 64 - protein, 104 aa, Artificial Sequence
  Chemically Synthesized
ACDYTCGSNCYSSSDVSTAQAAGYKLHEDGETVGSNSYPHKYYKSKGFVFSVSSPYYEWPILSSGDVYSGGSPGADRVVFNENNQLAGVITHTGASGNNFVECT

SEQ ID NO: 65 - protein, 104 aa, Artificial Sequence
  Chemically Synthesized
ACDYTCGSNCYSSSDVSTAQAAGYKLHEDGETVGSNSYPHKYYHYKGFHFSVTSPYYEWPILSSGDVYSGGSPGADRVVFNENNQLAGVITHTGASGNNFVECT

SEQ ID NO: 66 - protein, 104 aa, Artificial Sequence
  Chemically Synthesized
ACDYTCGSNCYSSSDVSTAQAAGYKLHEDGETVGSNSYPHEFRNWNGFDFSVSSPYYEYPILSSGDVYSGGSPGADRVVFNENNQLAGVITHTGASGNNFVECT

SEQ ID NO: 67 - protein, 150 aa, Artificial Sequence
  Chemically Synthesized
AVTWTCLNDQKNPKTNKYETKRLLYNQNKAESNSHHAPLSDGKTGSSYPHWFTNGYDGDGKLPKGRTPIKFGKSDCDRPPKHSKDGNGKTDHYLLEFPTFPDGHDYKFDSKKPKENPGPARVIYTYPNKVFCGIIAHTKENQGELKLCSH

SEQ ID NO: 68 - protein, 110 aa, Artificial Sequence
  Chemically Synthesized
ACDYTCGSNCYSSSDVSTAQAAGYKLHEDGETVGSNSYPHKYNNYEGFDFSVSSPYYEWPILSSGDVYKFDSKKPKENPGADRVVFNENNQLAGVITHTGASGNNFVECT

SEQ ID NO: 69 - protein, 110 aa, Artificial Sequence [sequence omitted]

SEQ ID NO: 70 - protein, 201 aa, Artificial Sequence
  Chemically Synthesized
KETAAAKFERQHMDSSTSAAGGSGGKETAAAKFERQHMDSSTSAAGGSGGKETAAAKFERQHMDSSTSAAGGSGGGSGATNFSLLKQAGDVEENPGPSSSNYCNQMMKSRNLTKDRCKPVNTFVHESLADVQAVCSQKNVACKNGQTNCYQSYSTMSITDCRETGSSKYPNCAYKTTQANKHIIVACEGNPYVPVHFDASV

SEQ ID NO: 71 - protein, 205 aa, Artificial Sequence
  Chemically Synthesized
AKDFDFFYFVQQWPGSYCDTKQSCCYPTTGKPAADFGIHGLWPNNNDGTYPSNCDPNSPYDQSQISDLISSMQQNWPTLACPSGSGSTFWSHEWEKHGTCAESVLTNQHAYFKKALDLKNQIDLLSILQGADIHPDGESYDLVNIRNAIKSAIGYTPWIQCNVDQSGNSQLYQVYICVDGSGSSLIECPIFPGGKCGTSIEFPTF

SEQ ID NO: 72 - protein, 232 aa, Artificial Sequence
  Chemically Synthesized
DKRLRDNHEWKKLIMVQHWPETVCEKIQNDCRDPPDYWTIHGLWPDKSEGCNRSWPFNLEEIKDLLPEMRAYWPDVIHSFPNRSRFWKHEWEKHGTCAAQVDALNSQKKYFGRSLELYRELDLNSVLLKLGIKPSINYYQVADFKDALARVYGVIPKIQCLPPSQDEEVQTIGQIELCLTKQDQQLQNCTEPGEQPSPKQEVWLANGAAESRGLRVCEDGPVFYPPPKKTKH

SEQ ID NO: 73 - protein, 104 aa, Artificial Sequence
  Chemically Synthesized
QDWLTFQKKHITNTRDVDCDNIMSTNLFHCKDKNTFIYSRPEPVKAICKGIIASKNVLTTSEFYLSDCNVTSRPCKYKLKKSTNKFCVTCENQAPVHFVGVGSC

SEQ ID NO: 74 - protein, 227 aa, Artificial Sequence
  Chemically Synthesized
ENITQWNLQDNGTEGIQRAMFQRGVNRSLHGIWPEKICTGVPSHLATDTELKAIHGMMDASEKTNYTCCRLQRHEWNKHGWCNWYNIEPWILLMNKTQANLTEGQPLRECAVTCRYDRDSDLNVVTQARDSPTPLTGCKKGKNFSFAGILVQGPCNFEIAVSDVLFKEHDRTSVIQDTAHYLVDGMTNSLESARQGTAKLTTWLGRQLGILGKKLENKSKTWFGAYA

SEQ ID NO: 75 - protein, 114 aa, Artificial Sequence [sequence omitted]

SEQ ID NO: 76 - protein, 209 aa, Artificial Sequence
  Chemically Synthesized
RERPDGRESLSHVPIVAVSTRVDTGNGSMELEIRPLFLVPDTNGFIDHLASLARLLESRKYILVVPLIVINELDGLAKGQETDHRAGGYARVVQEKARKSIEFLEQRFESRDSCLRALTSRGNELESIAFRSEDITGQLGNNDDLILSCCLHYCKDKAKDFMPASKEEPIRLLREVVLLTDDRNLRVKALTRNVPVRDIPAFLTWAQVG

SEQ ID NO: 77 - protein, 376 aa, Artificial Sequence
  Chemically Synthesized
MELEIRPLFLVPDTNGFIDHLASLARLLESRKYILVVPLIVINELDGLAKGQETDHRAGGYARVVQEKARKSIEFLEQRFESRDSCLRALTSRGNELESIAFRSEDITGQLGNNDDLILSCCLHYCKDKAKDFMPASKEEPIRLLREVVLLTDDRNLRVKALTRNVPVRDIPAFLTWAQVGGGGSGGGGSGGGGSMELEIRPLFLVPDTNGFIDHLASLARLLESRKYILVVPLIVINELDGLAKGQETDHRAGGYARVVQEKARKSIEFLEQRFESRDSCLRALTSRGNELESIAFRSEDITGQLGNNDDLILSCCLHYCKDKAKDFMPASKEEPIRLLREVVLLTDDRNLRVKALTRNVPVRDIPAFLTWAQVG

SEQ ID NO: 78 - protein, 124 aa, Artificial Sequence
  Chemically Synthesized
KESAAAKFERQHMDSGNSPSSSSNYCNLMMCCRKMTQGKCKPVNTFVHESLADVKAVCSQKKVTCKNGQTNCYQSKSTMRITDCRETGSSKYPNCAYKTTQVEKHIIVACGGKPSVPVHFDASV

SEQ ID NO: 79 - protein, 263 aa, Artificial Sequence
  Chemically Synthesized
KESAAAKFERQHMDSGNSPSSSSNYCNLMMCCRKMTQGKCKPVNTFVHESLADVKAVCSQKKVTCKNGQTNCYQSKSTMRITDCRETGSSKYPNCAYKTTQVEKHIIVACGGKPSVPVHFDASVGGGGSGGGGSGGGGSKESAAAKFERQHMDSGNSPSSSSNYCNLMMCCRKMTQGKCKPVNTFVHESLADVKAVCSQKKVTCKNGQTNCYQSKSTMRITDCRETGSSKYPNCAYKTTQVEKHIIVACGGKPSVPVHFDASV

SEQ ID NO: 80 - protein, 127 aa, Artificial Sequence
  Chemically Synthesized
FSNRPMPLNLYQFKNMIQCTVPNRSWWDFADYGCYCGRGGSGTPVDDLDRCCQVHDNCYNEAEKISRCWPYFKTYSYECSQGTLTCKGDNDACAAAVCDCDRLAAICFAGAPYNNNNYNIDLKARCQ

SEQ ID NO: 81 - protein, 131 aa, Artificial Sequence
  Chemically Synthesized
FDTIKDSKQLNGLALAYIGDAIFEVYVRHHLLKQGFTKPNDLHKKSSRIVSAKSQAEILFFLQNQSFFTEEEEAVLKRGRNAKSGTTPKNTDVQTYRYSTAFEALLGYLFLEKKEERLSQLVAEAIQFGTS

SEQ ID NO: 82 - protein, 277 aa, Artificial Sequence
  Chemically Synthesized
FDTIKDSKQLNGLALAYIGDAIFEVYVRHHLLKQGFTKPNDLHKKSSRIVSAKSQAEILFFLQNQSFFTEEEEAVLKRGRNAKSGTTPKNTDVQTYRYSTAFEALLGYLFLEKKEERLSQLVAEAIQFGTSGGGGSGGGGSGGGGSFDTIKDSKQLNGLALAYIGDAIFEVYVRHHLLKQGFTKPNDLHKKSSRIVSAKSQAEILFFLQNQSFFTEEEEAVLKRGRNAKSGTTPKNTDVQTYRYSTAFEALLGYLFLEKKEERLSQLVAEAIQFGTS

SEQ ID NO: 83 - protein, 199 aa, Artificial Sequence
  Chemically Synthesized
DAEKTLNHLISGFETFEKKINYRFKNKAYLLQAFTHASYHYNTITDCYQRLEFLGDAILDYLITKHLYEDPRQHSPGVLTDLRSALVNNTIFASLAVKYDYHKYFKAVSPELFHVIDDFVKFQLEKNEMQGMDSELRRSEEDEEKEEDIEVPKAMGDIFESLAGAIYMDSGMSLEVVWQVYYPMMQPLIEKFSANVPRS

SEQ ID NO: 84 - protein, 413 aa, Artificial Sequence
  Chemically Synthesized
DAEKTLNHLISGFETFEKKINYRFKNKAYLLQAFTHASYHYNTITDCYQRLEFLGDAILDYLITKHLYEDPRQHSPGVLTDLRSALVNNTIFASLAVKYDYHKYFKAVSPELFHVIDDFVKFQLEKNEMQGMDSELRRSEEDEEKEEDIEVPKAMGDIFESLAGAIYMDSGMSLEVVWQVYYPMMQPLIEKFSANVPRSGGGGSGGGGSGGGGSDAEKTLNHLISGFETFEKKINYRFKNKAYLLQAFTHASYHYNTITDCYQRLEFLGDAILDYLITKHLYEDPRQHSPGVLTDLRSALVNNTIFASLAVKYDYHKYFKAVSPELFHVIDDFVKFQLEKNEMQGMDSELRRSEEDEEKEEDIEVPKAMGDIFESLAGAIYMDSGMSLEVVWQVYYPMMQPLIEKFSANVPRS

SEQ ID NO: 85 - protein, 322 aa, Artificial Sequence
  Chemically Synthesized
PKYGDRKVHHMHMRKKGINTLINIMSRLGQDDPTPSRINHNERLEFLGDAVVEFLTSVHLYYLFPSLEEGGLATYRTAIVQNQHLAMLAKKLELDRFMLYAHGPDLCRESDLRHAMANCFEALIGAVYLEGSLEEAKQLFGRLLFNDPDLREVWLNYPLHPLQLQEPNTDRQLIETSPVLQKLTEFEEAIGVIFTHVRLLARAFTLRTVGFNHLTLGHNQRMEFLGDSIMQLVATEYLFIHFPDHHEGHLTLLRSSLVNNRTQAKVAEELGMQEYAITNDKTKRPVALRTKTLADLLESFIAALYIDKDLEYVHTFMNVCFF

SEQ ID NO: 86 - protein, 463 aa, Artificial Sequence
  Chemically Synthesized
IGGERYFAITAGLRLDQGRGRGLAGWRTPFGPFGVSHTDVFQRLELLGDAVLGFIVTARLLCLFPDASVGTLVELKMELVRNEALNYLVQTLGLPQLAEFSNNLVAKSKTWADMYEEIVGSIFTGPNGIYGCEEFLAKTLMSPEHSKTVGSACPDAVTKASKRVCMGEAGAHEFRSLVDYACEQGISVFCSSRVSTMFLERLRDIPAEDMLDWYRLGIQFSHRSGLSGPGGVVSVIDIMTHLARGLWLGSPGFYVEQQTDKNESACPPTIPVLYIYHRSVQCPVLYGSLTETPTGPVASKVLALYEKILAYESSGGSKHIAAQTVSRSLAVPIPSGTIPFLIRLLQIALTPHVYQKLELLGDAFLKCSLALHLHALHPTLTEGALTRMRQSAETNSVLGRLTKRFPSVVSEVIIESHPKIQPDSKVYGDTFEAILAAILLACGEEAAGAFVREHVLPQVVADA

SEQ ID NO: 87 - protein, 309 aa, Artificial Sequence
  Chemically Synthesized
NPIVINRLQRKLGYTFNHQELLQQALTHRSASSKHNERLEFLGDSILSYVIANALYHRFPRVDEGDMSRMRATLVRGNTLAELAREFELGECLRLGPGELKSGGFRRESILADTVEALIGGVFLDSDIQTVEKLILNWYQTRLDEISGGGGSGGGGSGGGGSNPIVINRLQRKLGYTFNHQELLQQALTHRSASSKHNERLEFLGDSILSYVIANALYHRFPRVDEGDMSRMRATLVRGNTLAELAREFELGECLRLGPGELKSGGFRRESILADTVEALIGGVFLDSDIQTVEKLILNWYQTRLDEIS

SEQ ID NO: 88 - protein, 148 aa, Artificial Sequence
  Chemically Synthesized
IIGYFDGLCEPKNPGGIATFGFVIYLDNRKIEGYGLAEKPFSINSTNNVAEYSGLICLMETMLRLGISSPIIKGDSQLVIKQMNGEYKVKAKRIIPLYEKAIELKKKLNATLIWVPREENKEADRLSRVAYELVRRGKLRDIGCIILT

SEQ ID NO: 89 - protein, 148 aa, Artificial Sequence
  Chemically Synthesized
IIGYFDGLCEPKNPGGIATFGFVIYLDNRKIEGYGLAEKPFSINSTNNVAEYSGLICLMETMLRLGISSPIIKGDSQLVIKQMNGEYKVKAKRIIPLYEKAIELKKKLNATLIWVPREENKEANRLSRVAYELVRRGKLRDIGCIILT

SEQ ID NO: 90 - protein, 108 aa, Artificial Sequence
  Chemically Synthesized
SSSTYCNQMMRRRNMTQGRCKPVNTFVHEPLVDVQNVCFQEKVTCKNGQGNCYKSNSSMHITDCRLTNGSRYPNCAYRTSPKERHIIVACEGSPYVPVHFDASVEDST

SEQ ID NO: 91 - protein, 19 aa, Artificial Sequence
  Chemically Synthesized
MKESRAKKFQRQHMDSDSS

SEQ ID NO: 92 - protein, 189 aa, Artificial Sequence
  Chemically Synthesized
MKESRAKKFQRQHMDSDSSGGGGSGGGGSLEPSAGDMRAANLWPSPLMIKRSKKNSLALSLTADQMVSALLDAEPPILYSEYDPTRPFSEASMMGLLTNLADRELVHMINWAKRVPGFVDLTLHDQVHLLECAWLEILMIGLVWRSMEHPVKLLFAPNLLLDRNQGKCVEGMVEIFDMLLATSSRFRMM

SEQ ID NO: 93 - protein, 108 aa, Artificial Sequence
  Chemically Synthesized
SSSTYCNQMMKLRNMTQGWCKSVNTFVHEPLVDVQNVCFQEKVTCKNGQTNCFKSNSKMHITECRLTNGSKYPNCAYQTSPKERHIIVACEGSPYVPVHFDDSVEDST

SEQ ID NO: 94 - protein, 19 aa, Artificial Sequence
  Chemically Synthesized
MGESQAEKFQRQHMDSGSS

SEQ ID NO: 95 - protein, 189 aa, Artificial Sequence
  Chemically Synthesized
MGESQAEKFQRQHMDSGSSGGGGSGGGGSLEPSAGDMRAANLWPSPLMIKRSKKNSLALSLTADQMVSALLDAEPPILYSEYDPTRPFSEASMMGLLTNLADRELVHMINWAKRVPGFVDLTLHDQVHLLECAWLEILMIGLVWRSMEHPVKLLFAPNLLLDRNQGKCVEGMVEIFDMLLATSSRFRMM

SEQ ID NO: 96 - protein, 104 aa, Artificial Sequence
  Chemically Synthesized
SSSNYCNQMMKSRNLTKDRCKPVNTFVHESLADVQAVCSQKNVACKNGQTNCYQSYSTMSITDCRETGSSKYPNCAYKTTQANKHIIVACEGNPYVPVHFDASV

SEQ ID NO: 97 - protein, 21 aa, Artificial Sequence
  Chemically Synthesized
MKETAAAKFERQHMDSSTSAA

SEQ ID NO: 98 - protein, 191 aa, Artificial Sequence
  Chemically Synthesized
MKETAAAKFERQHMDSSTSAAGGGGSGGGGSLEPSAGDMRAANLWPSPLMIKRSKKNSLALSLTADQMVSALLDAEPPILYSEYDPTRPFSEASMMGLLTNLADRELVHMINWAKRVPGFVDLTLHDQVHLLECAWLEILMIGLVWRSMEHPVKLLFAPNLLLDRNQGKCVEGMVEIFDMLLATSSRFRMM

SEQ ID NO: 99 - protein, 70 aa, Artificial Sequence
  Chemically Synthesized
KETAAAKFERQHMDSSTSAAGGSGGKETAAAKFERQHMDSSTSAAGGSGGKETAAAKFERQHMDSSTSAA

SEQ ID NO: 100 - protein, 14 aa, Artificial Sequence
  Chemically Synthesized
SRGGGGSGGGGSTR

SEQ ID NO: 101 - protein, 13 aa, Artificial Sequence
  Chemically Synthesized
RGGGGSGGGGSTR

SEQ ID NO: 102 - protein, 13 aa, Artificial Sequence
  Chemically Synthesized
GGGGSGGGGSLEP

SEQ ID NO: 103 - protein, 4 aa, Artificial Sequence
  Chemically Synthesized
GGGG

SEQ ID NO: 104 - protein, 10 aa, Artificial Sequence
  Chemically Synthesized
GGGGSGGGGS

SEQ ID NO: 105 - protein, 5 aa, Artificial Sequence
  Chemically Synthesized
EAAAK

SEQ ID NO: 106 - protein, 10 aa, Artificial Sequence
  Chemically Synthesized
EAAAKEAAAK

SEQ ID NO: 107 - protein, 12 aa, Artificial Sequence
  Chemically Synthesized
KAEEEKKAAEEK

SEQ ID NO: 108 - protein, 16 aa, Artificial Sequence
  Chemically Synthesized
SGSETPGTSESATPES

SEQ ID NO: 109 - protein, 22 aa, Artificial Sequence
  Chemically Synthesized
DYKDHDGDYKDHDIDYKDDDDK

SEQ ID NO: 110 - protein, 39 aa, Artificial Sequence
  Chemically Synthesized
NSKKRSLEDNETEIKVSRDTWNTKNMRSLEPPRSKKRIH

SEQ ID NO: 111 - protein, 39 aa, Artificial Sequence
  Chemically Synthesized
KSKKRSLEDNETEIEVSRDTWNNKNMRSLEPPRSKKRIN

SEQ ID NO: 112 - protein, 43 aa, Artificial Sequence
  Chemically Synthesized
TMKKRDAETADIGDQSEVESDTEELKKIMFGEKKKLNKKKRKQ

SEQ ID NO: 113 - protein, 9 aa, Artificial Sequence
  Chemically Synthesized
PKKKRKVSS

SEQ ID NO: 114 - protein, 24 aa, Artificial Sequence
  Chemically Synthesized
DPKKKRKVDPKKKRKVDPKKKRKV

SEQ ID NO: 115 - protein, 16 aa, Artificial Sequence
  Chemically Synthesized
KRPAATKKAGQAKKKK

SEQ ID NO: 116 - protein, 37 aa, Artificial Sequence
  Chemically Synthesized
RQKKRVYYDDGLTEEQFLEAVEDDNMSLEDAIKKRRE

SEQ ID NO: 117 - protein, 33 aa, Artificial Sequence
  Chemically Synthesized
NVKKRKRRSKKINKLTDGQIRINHVSSEKKRRE

SEQ ID NO: 118 - protein, 34 aa, Artificial Sequence
  Chemically Synthesized
KKRNSNEYRLVPTKWQDYKKPGPNQKYTSDGKKR

SEQ ID NO: 119 - protein, 36 aa, Artificial Sequence
  Chemically Synthesized
KKRLHLIIADAELETVPPEILDHPAIVNYAKRRKKR

SEQ ID NO: 120 - protein, 29 aa, Artificial Sequence
  Chemically Synthesized
KKRIEELEIELGLRAPPKKEKKGKKSKKR

SEQ ID NO: 121 - protein, 26 aa, Artificial Sequence
  Chemically Synthesized
KKRALKYRLNPKLLKENNKKDVNKKR

SEQ ID NO: 122 - protein, 26 aa, Artificial Sequence
  Chemically Synthesized
KKRNFLESIEISINLKDVDLSDPKKR

SEQ ID NO: 123 - protein, 30 aa, Artificial Sequence
  Chemically Synthesized
KKRSEKSMALRLAGELSEAAEGRGGAMKKR

SEQ ID NO: 124 - protein, 30 aa, Artificial Sequence
  Chemically Synthesized
KKRFKLTGTGKIKRKHAFKSHILTKKSKKR

SEQ ID NO: 125 - protein, 30 aa, Artificial Sequence
  Chemically Synthesized
KKRNEHTMEERLAGELADAVNGRGTAVKKR

SEQ ID NO: 126 - protein, 30 aa, Artificial Sequence; identical to SEQ ID NO: 123
  Chemically Synthesized

SEQ ID NO: 127 - protein, 30 aa, Artificial Sequence
  Chemically Synthesized
KKRGEKSMSLRLANELMEATEGRGGAMKKR

SEQ ID NO: 128 - protein, 46 aa, Artificial Sequence
  Chemically Synthesized
KKRLATHNAGKGAKYTRYRLPVSLLYYEVFDSKEAAMSAEALFKKR

SEQ ID NO: 129 - protein, 30 aa, Artificial Sequence; identical to SEQ ID NO: 123
  Chemically Synthesized

SEQ ID NO: 130 - protein, 30 aa, Artificial Sequence; identical to SEQ ID NO: 123
  Chemically Synthesized

SEQ ID NO: 131 - protein, 30 aa, Artificial Sequence; identical to SEQ ID NO: 123
  Chemically Synthesized

SEQ ID NO: 132 - protein, 30 aa, Artificial Sequence; identical to SEQ ID NO: 123
  Chemically Synthesized

SEQ ID NO: 133 - protein, 30 aa, Artificial Sequence; identical to SEQ ID NO: 123
  Chemically Synthesized

SEQ ID NO: 134 - protein, 30 aa, Artificial Sequence
  Chemically Synthesized
KKRGEKSMAQRLANELLEAAEGRGGAMKKR

SEQ ID NO: 135 - protein, 30 aa, Artificial Sequence
  Chemically Synthesized
KKRFKVTGSGKIKRKHAFKSHILTKKSKKR

SEQ ID NO: 136 - protein, 44 aa, Artificial Sequence
  Chemically Synthesized
KKRKKYLKAAKGYRGALSRRYKLAKQMYVRSKWYSYVGRKLKKR

SEQ ID NO: 137 - protein, 30 aa, Artificial Sequence; identical to SEQ ID NO: 135
  Chemically Synthesized

SEQ ID NO: 138 - protein, 44 aa, Artificial Sequence
  Chemically Synthesized
KKRKKIMKAVKGYRGALSRRYRLAKQAYIKAKKHAYVGRKLKKR

SEQ ID NO: 139 - protein, 32 aa, Artificial Sequence
  Chemically Synthesized
KKRGYQTHGIRPRLAKKKTVMSKIARKQGKKR

SEQ ID NO: 140 - protein, 45 aa, Artificial Sequence
  Chemically Synthesized
KKRREKFLKSAKGYRGAIKRRYRLAKQHYYRAKWYAYAGRKLKKR

SEQ ID NO: 141 - protein, 37 aa, Artificial Sequence
  Chemically Synthesized
KKRIGLIFGGYSNEHEVSISSAKTVFQAFNSEINKKR

SEQ ID NO: 142 - protein, 30 aa, Artificial Sequence; identical to SEQ ID NO: 123
  Chemically Synthesized

SEQ ID NO: 143 - protein, 30 aa, Artificial Sequence
  Chemically Synthesized
KKRGEKSMDLRLAGELIDASEGRGAAMKKR

SEQ ID NO: 144 - protein, 46 aa, Artificial Sequence
  Chemically Synthesized
KKRFSFHALHLRLSPRLLKSEKAQRHTKEYTARLYRAFMRSVEKKR

SEQ ID NO: 145 - protein, 30 aa, Artificial Sequence
  Chemically Synthesized
KKRNEKTMEERLAKEILDASQGTGAAVKKR

SEQ ID NO: 146 - protein, 46 aa, Artificial Sequence
  Chemically Synthesized
KKRAMELGIDVITPKNINDEEVFDLLDKLNPDFIVVVAYGQLIKKR

SEQ ID NO: 147 - protein, 30 aa, Artificial Sequence; identical to SEQ ID NO: 123
  Chemically Synthesized

SEQ ID NO: 148 - protein, 44 aa, Artificial Sequence
  Chemically Synthesized
KKRKKYLKAAKGYRGALSRRYKLAKQMYVRSKWYSYVGRKQKKR

SEQ ID NO: 149 - protein, 42 aa, Artificial Sequence
  Chemically Synthesized
KKRRAILEAASGYRGQRSRLYRKAKEQVTHSLVYNYNDRKKR

SEQ ID NO: 150 - protein, 30 aa, Artificial Sequence; identical to SEQ ID NO: 134
  Chemically Synthesized

SEQ ID NO: 151 - protein, 30 aa, Artificial Sequence; identical to SEQ ID NO: 123
  Chemically Synthesized

SEQ ID NO: 152 - protein, 30 aa, Artificial Sequence; identical to SEQ ID NO: 123
  Chemically Synthesized

SEQ ID NO: 153 - protein, 30 aa, Artificial Sequence; identical to SEQ ID NO: 123
  Chemically Synthesized

SEQ ID NO: 154 - protein, 30 aa, Artificial Sequence
  Chemically Synthesized
KKRSEKSMALRLAGELLEASEGRGGAMKKR

SEQ ID NO: 155 - protein, 29 aa, Artificial Sequence
  Chemically Synthesized
KKRMKSIGTVEVPQEAFLAILKTDTSKKR

SEQ ID NO: 156 - protein, 30 aa, Artificial Sequence
  Chemically Synthesized
KKRSEKSMALRLAGELLEAAEGRGGAMKKR

SEQ ID NO: 157 - protein, 30 aa, Artificial Sequence; identical to SEQ ID NO: 123
  Chemically Synthesized

SEQ ID NO: 158 - protein, 42 aa, Artificial Sequence
  Chemically Synthesized
KKRILNKAKGYWGSRGTILTVAKHAVDKAEQYAYRDRRVKKR

SEQ ID NO: 159 - protein, 44 aa, Artificial Sequence
  Chemically Synthesized
KKRRKILKAVKGYHGALSRRYRLAKQAYIKAKKHAYVGRKLKKR

SEQ ID NO: 160 - protein, 26 aa, Artificial Sequence
  Chemically Synthesized
KKRGIGVKVNNGILWLLELQPEGKKR

SEQ ID NO: 161 - protein, 44 aa, Artificial Sequence
  Chemically Synthesized
KKRKKFLKEAKGYRGALSRRYKLAKQMYIRSKWYSYVGRKIKKR

SEQ ID NO: 162 - protein, 32 aa, Artificial Sequence
  Chemically Synthesized
KKRFSVTGSGKVRRLKAYKSHILTKMSGKKKR

SEQ ID NO: 163 - protein, 43 aa, Artificial Sequence
  Chemically Synthesized
KKRKYLKAAKGYRGALSRRYRLAKQYYIRSGVYAYVGRKQKKR

SEQ ID NO: 164 - protein, 42 aa, Artificial Sequence
  Chemically Synthesized
KKRRAILEQASGYRGQRSRLYRKAKEQVTHSLVYNYNDRKKR

SEQ ID NO: 165 - protein, 46 aa, Artificial Sequence; identical to SEQ ID NO: 128
  Chemically Synthesized

SEQ ID NO: 166 - protein, 46 aa, Artificial Sequence; identical to SEQ ID NO: 128
  Chemically Synthesized

SEQ ID NO: 167 - protein, 27 aa, Artificial Sequence
  Chemically Synthesized
KKRIPNTVFIFLVPPEKKALYDRLKKR

SEQ ID NO: 168 - protein, 46 aa, Artificial Sequence; identical to SEQ ID NO: 128
  Chemically Synthesized

SEQ ID NO: 169 - protein, 40 aa, Artificial Sequence
  Chemically Synthesized
KKRILDTLFTRSPKNQQDFIEHTDDKKSIVNFFVGAFKKR

SEQ ID NO: 170 - protein, 26 aa, Artificial Sequence
  Chemically Synthesized
KKRELQELNQIRRNLEQSNASLLKKR

SEQ ID NO: 171 - protein, 37 aa, Artificial Sequence
  Chemically Synthesized
KKRNHMAWVWGIVGLIQAPMPLICYYFFVIRPDRKKR

SEQ ID NO: 172 - protein, 40 aa, Artificial Sequence
  Chemically Synthesized
KKRLFEEQQEAKKIDYANSRIKAIKLIGAIIFFMKSSKKR

SEQ ID NO: 173 - protein, 28 aa, Artificial Sequence
  Chemically Synthesized
KKRKKIPGLAMIVIGNNPASLIYVNKKR

SEQ ID NO: 174 - protein, 27 aa, Artificial Sequence
  Chemically Synthesized
KKRPELLIAFGGCMAQLPEVRQKLKKR

SEQ ID NO: 175 - protein, 30 aa, Artificial Sequence; identical to SEQ ID NO: 123
  Chemically Synthesized

SEQ ID NO: 176 - protein, 30 aa, Artificial Sequence; identical to SEQ ID NO: 154
  Chemically Synthesized

SEQ ID NO: 177 - protein, 32 aa, Artificial Sequence
  Chemically Synthesized
KKRGYQKYGVRPRLAKKKTVMCKIARKQGKKR

SEQ ID NO: 178 - protein, 31 aa, Artificial Sequence
  Chemically Synthesized
KKRSSHSKKQRGNKSRGFDQKSQRVSKGKKR

SEQ ID NO: 179 - protein, 32 aa, Artificial Sequence; identical to SEQ ID NO: 177
  Chemically Synthesized

SEQ ID NO: 180 - protein, 31 aa, Artificial Sequence
  Chemically Synthesized
KKRSSHSKKQRGNKSRGFDQKSQRSSKGKKR

SEQ ID NO: 181 - protein, 30 aa, Artificial Sequence; identical to SEQ ID NO: 127
  Chemically Synthesized

SEQ ID NO: 182 - protein, 30 aa, Artificial Sequence; identical to SEQ ID NO: 123
  Chemically Synthesized

SEQ ID NO: 183 - protein, 44 aa, Artificial Sequence
  Chemically Synthesized
KKRRKLLKEARGYRGTKHTSYKRAKEQVWKSGVYAYVGRKQKKR

SEQ ID NO: 184 - protein, 30 aa, Artificial Sequence; identical to SEQ ID NO: 123
  Chemically Synthesized

SEQ ID NO: 185 - protein, 46 aa, Artificial Sequence; identical to SEQ ID NO: 128
  Chemically Synthesized

SEQ ID NO: 186 - protein, 46 aa, Artificial Sequence; identical to SEQ ID NO: 128
  Chemically Synthesized

SEQ ID NO: 187 - protein, 46 aa, Artificial Sequence; identical to SEQ ID NO: 128
  Chemically Synthesized

SEQ ID NO: 188 - protein, 46 aa, Artificial Sequence; identical to SEQ ID NO: 128
  Chemically Synthesized

SEQ ID NO: 189 - protein, 30 aa, Artificial Sequence; identical to SEQ ID NO: 156
  Chemically Synthesized

SEQ ID NO: 190 - protein, 30 aa, Artificial Sequence; identical to SEQ ID NO: 143
  Chemically Synthesized

SEQ ID NO: 191 - protein, 27 aa, Artificial Sequence
  Chemically Synthesized
KKRMPNTVFIFLVPPKKKDLYDRLKKR

SEQ ID NO: 192 - protein, 30 aa, Artificial Sequence; identical to SEQ ID NO: 123
  Chemically Synthesized

SEQ ID NO: 193 - protein, 30 aa, Artificial Sequence; identical to SEQ ID NO: 123
  Chemically Synthesized

SEQ ID NO: 194 - protein, 30 aa, Artificial Sequence; identical to SEQ ID NO: 123
  Chemically Synthesized

SEQ ID NO: 195 - protein, 45 aa, Artificial Sequence
  Chemically Synthesized
KKRKGMSNKKVLTGVVVATKCDKTIKVMVSRMVRHKTYKKIVKKR

SEQ ID NO: 196 - protein, 30 aa, Artificial Sequence; identical to SEQ ID NO: 154
  Chemically Synthesized

SEQ ID NO: 197 - protein, 46 aa, Artificial Sequence; identical to SEQ ID NO: 128
  Chemically Synthesized

SEQ ID NO: 198 - protein, 40 aa, Artificial Sequence
  Chemically Synthesized
KKRILDTFFKRNNSNHKDFVEHEEKRKSLLKIAINAFKKR

SEQ ID NO: 199 - protein, 44 aa, Artificial Sequence
  Chemically Synthesized
KKRDNTRLIHYEGTTRRGESYYVDVFSLMYPKMDILLEYASKKR

SEQ ID NO: 200 - protein, 30 aa, Artificial Sequence
  Chemically Synthesized
KKRFALTGTGKIKRKHAFHSHILTKKSKKR

SEQ ID NO: 201 - protein, 41 aa, Artificial Sequence
  Chemically Synthesized
KKRATVRIQGQTYKVVSSEEPAHVKEVASYMNKKMEELKKR

SEQ ID NO: 202 - protein, 46 aa, Artificial Sequence; identical to SEQ ID NO: 128
  Chemically Synthesized

SEQ ID NO: 203 - protein, 30 aa, Artificial Sequence; identical to SEQ ID NO: 123
  Chemically Synthesized

SEQ ID NO: 204 - protein, 30 aa, Artificial Sequence; identical to SEQ ID NO: 123
  Chemically Synthesized

SEQ ID NO: 205 - protein, 30 aa, Artificial Sequence; identical to SEQ ID NO: 200
  Chemically Synthesized

SEQ ID NO: 206 - protein, 30 aa, Artificial Sequence
  Chemically Synthesized
KKREFETQGRKPHWRFLLPNFENDPLQKKR

SEQ ID NO: 207 - protein, 46 aa, Artificial Sequence
  Chemically Synthesized
KKRKIIALCGIDTRALTVLIREKGALNGIIAHDPNGNFDINTLKKR

SEQ ID NO: 208 - protein, 36 aa, Artificial Sequence
  Chemically Synthesized
KKRSRGVGSEGPAVFREKSTTQVDVEARKSQKDKKR

SEQ ID NO: 209 - protein, 42 aa, Artificial Sequence
  Chemically Synthesized
KKRLFKLAKGFVGDRKNHLRLTSGAVMRAMAYNYAHRKQKKR

SEQ ID NO: 210 - protein, 36 aa, Artificial Sequence
  Chemically Synthesized
KKRFERKKEASPADTPPESDSTTENASVEKKAEKKR

SEQ ID NO: 211 - protein, 27 aa, Artificial Sequence
  Chemically Synthesized
KKRLDKEGVMKSVKAHRFYSKPSIKKR

SEQ ID NO: 212 - protein, 45 aa, Artificial Sequence
  Chemically Synthesized
KKRPEQGRIAALYSDIVILADEDPRGEDSVELLEMIAAGCPEKKR

SEQ ID NO: 213 - protein, 36 aa, Artificial Sequence
  Chemically Synthesized
KKRSLPNLRTVRVKLEDGTTVKLRVAASTLRTMKKR

SEQ ID NO: 214 - protein, 30 aa, Artificial Sequence
  Chemically Synthesized
KKRFRLSAKGKAMHRQSGTSHLAKGLSKKR

SEQ ID NO: 215 - protein, 30 aa, Artificial Sequence; identical to SEQ ID NO: 143
  Chemically Synthesized

SEQ ID NO: 216 - protein, 30 aa, Artificial Sequence; identical to SEQ ID NO: 143
  Chemically Synthesized

SEQ ID NO: 217 - protein, 30 aa, Artificial Sequence; identical to SEQ ID NO: 143
  Chemically Synthesized

SEQ ID NO: 218 - protein, 42 aa, Artificial Sequence; identical to SEQ ID NO: 149
  Chemically Synthesized

SEQ ID NO: 219 - protein, 42 aa, Artificial Sequence
  Chemically Synthesized
KKRIQYNERLEFLGDSVLQLVITEYLFMNYKDKSEGELSKKR

SEQ ID NO: 220 - protein, 30 aa, Artificial Sequence
  Chemically Synthesized
KKRFTLTGTGKIKRKHAFHSHILTKKSKKR

SEQ ID NO: 221 - protein, 43 aa, Artificial Sequence
  Chemically Synthesized
KKRDLENCSYQASGISVVSHPKNPYVPTSHLNIRFFLAKNKKR

SEQ ID NO: 222 - protein, 26 aa, Artificial Sequence
  Chemically Synthesized
KKRRDFLKNNHVSFLISIHADSSKKR

SEQ ID NO: 223 - protein, 46 aa, Artificial Sequence; identical to SEQ ID NO: 128
  Chemically Synthesized

SEQ ID NO: 224 - protein, 32 aa, Artificial Sequence; identical to SEQ ID NO: 177
  Chemically Synthesized

SEQ ID NO: 225 - protein, 31 aa, Artificial Sequence
  Chemically Synthesized
KKRSSHSKKQRGNKSRGFDQKSQRGSKGKKR

SEQ ID NO: 226 - protein, 30 aa, Artificial Sequence; identical to SEQ ID NO: 154
  Chemically Synthesized

SEQ ID NO: 227 - protein, 30 aa, Artificial Sequence
  Chemically Synthesized
KKREIFTSIFEDKIDLKLFSFLIILIEKKR

SEQ ID NO: 228 - protein, 31 aa, Artificial Sequence
  Chemically Synthesized
KKRARRPGVPTRGDKKRAPRLGVPARGDKKR

SEQ ID NO: 229 - protein, 31 aa, Artificial Sequence
  Chemically Synthesized
KKRAPRLGVPARGDKKRARRPGVPAREDKKR

SEQ ID NO: 230 - protein, 31 aa, Artificial Sequence
  Chemically Synthesized
KKRARRPGVPAREDKKRAPRPGVPTRGDKKR

SEQ ID NO: 231 - protein, 31 aa, Artificial Sequence
  Chemically Synthesized
KKRAPRPGVPTRGDKKRAPRLGVPARGDKKR

SEQ ID NO: 232 - protein, 45 aa, Artificial Sequence
  Chemically Synthesized
KKRARRPGVPTRGDKKRAPRLGVPARGDKKRARRPGVPAREDKKR

SEQ ID NO: 233 - protein, 45 aa, Artificial Sequence
  Chemically Synthesized
KKRAPRLGVPARGDKKRARRPGVPAREDKKRAPRPGVPTRGDKKR

SEQ ID NO: 234 - protein, 45 aa, Artificial Sequence
  Chemically Synthesized
KKRARRPGVPAREDKKRAPRPGVPTRGDKKRAPRLGVPARGDKKR

SEQ ID NO: 235 - protein, 44 aa, Artificial Sequence; identical to SEQ ID NO: 148
  Chemically Synthesized

SEQ ID NO: 236 - protein, 45 aa, Artificial Sequence
  Chemically Synthesized
KKRTSVPDDDFVFTLSDDENDVLENGADEGDEQADEETASGSKKR

SEQ ID NO: 237 - protein, 38 aa, Artificial Sequence
  Chemically Synthesized
KKRAAAKDDDFVLTLSDDENDVLENGVEEDTLSSSKKR

SEQ ID NO: 238 - protein, 42 aa, Artificial Sequence
  Chemically Synthesized
KKRLQKQAKEEERARREAEKAAEEAAAKAEQEKKLEEQRKKR

SEQ ID NO: 239 - protein, 45 aa, Artificial Sequence
  Chemically Synthesized
KKRANADDDFVLTLSDDENDTLNQLEEEGEGDDGALATGSKTKKR

SEQ ID NO: 240 - protein, 44 aa, Artificial Sequence
  Chemically Synthesized
KKRAQETKIDSKESVKESPKQENSILKRLASSIKKQELPFTKKR

SEQ ID NO: 241 - protein, 46 aa, Artificial Sequence
  Chemically Synthesized
KKRSAEEEEKDLKKIMMTNKQRKLYNKMQYGINKKETRQDELAKKR

SEQ ID NO: 242 - protein, 35 aa, Artificial Sequence
  Chemically Synthesized
KKRKAHEERKEEKRSYKKTKSDRSAPKTKAKSKKR

SEQ ID NO: 243 - protein, 41 aa, Artificial Sequence
  Chemically Synthesized
KKRTIDKVDDSVEDGAEKKPEAAVKNDGETAEKPEKKHKKR

SEQ ID NO: 244 - protein, 39 aa, Artificial Sequence
  Chemically Synthesized
KKRKANEERKEEGKERSYKKTKADRTKLKTKAKSSSKKR

SEQ ID NO: 245 - protein, 26 aa, Artificial Sequence
  Chemically Synthesized
KKRAAQKKKEEEELERQKMMMSRKKR

SEQ ID NO: 246 - protein, 38 aa, Artificial Sequence
  Chemically Synthesized
KKRKREIERLEKMTDEEKKEEQAKEKELQDLIEQVKKR

SEQ ID NO: 247 - protein, 26 aa, Artificial Sequence
  Chemically Synthesized
KKRGHNSIIGHEKTNALETLKKKKKR

SEQ ID NO: 248 - protein, 43 aa, Artificial Sequence
  Chemically Synthesized
KKRSAKIKKATFDANKKKEVGVSDLTLLSKISDESINENLKKR

SEQ ID NO: 249 - protein, 37 aa, Artificial Sequence
  Chemically Synthesized
KKRKAREILDKHRKEEKELVKEGKTPYYLKKAEQKKR

SEQ ID NO: 250 - protein, 39 aa, Artificial Sequence
  Chemically Synthesized
KKRTHDELEQDGKEEEEKKEGEKPSSQNRAERDEPEKKR

SEQ ID NO: 251 - protein, 35 aa, Artificial Sequence
  Chemically Synthesized
KKRSLEDNETEIKVSRDTWNTKNMRSLEPPRSKKR

SEQ ID NO: 252 - protein, 35 aa, Artificial Sequence; identical to SEQ ID NO: 251
  Chemically Synthesized

SEQ ID NO: 253 - protein, 45 aa, Artificial Sequence
  Chemically Synthesized
KKRLPQAKRACAKCQKDNKKCDDARPCQRCIKAKTDCIDLPRKKR

SEQ ID NO: 254 - protein, 26 aa, Artificial Sequence
  Chemically Synthesized
KKRNSEEANDENDETNLKIPIPEKKR

SEQ ID NO: 255 - protein, 37 aa, Artificial Sequence
  Chemically Synthesized
KKRKVNELSQDVISLHSPKESNARKTKKNKNKKKKKR

SEQ ID NO: 256 - protein, 34 aa, Artificial Sequence
  Chemically Synthesized
KKRKSKSKQESSDSGVSEDDEIPLSDARNKTKKR

SEQ ID NO: 257 - protein, 45 aa, Artificial Sequence
  Chemically Synthesized
KKRKLKDTVSNCEFTEEDSESSFLLETIQPTKSTLRRSISPLKKR

SEQ ID NO: 258 - protein, 35 aa, Artificial Sequence
  Chemically Synthesized
KKRAEKKEQQKEKKKEKEKERMKAFIPPEESSKKR

SEQ ID NO: 259 - protein, 35 aa, Artificial Sequence
  Chemically Synthesized
KKRSANELAIDDQDTKESTDLAGTEDSAPKANKKR

SEQ ID NO: 260 - protein, 44 aa, Artificial Sequence
  Chemically Synthesized
KKRLTYSELFHKTQELNEELQSCLQKILEASADRNESKQDAKKR

SEQ ID NO: 261 - protein, 31 aa, Artificial Sequence
  Chemically Synthesized
KKRTKIQCSHFDLLVKLGQGGYGSVWLAKKR

SEQ ID NO: 262 - protein, 35 aa, Artificial Sequence
  Chemically Synthesized
KKRKSKLVEMTPKGLKKRKRVQIQEGSVSTNTKKR

SEQ ID NO: 263 - protein, 42 aa, Artificial Sequence
  Chemically Synthesized
KKRNVEEQNLIEQSITESQRIFSEKQRLEQERFNRELLEKKR

SEQ ID NO: 264 - protein, 35 aa, Artificial Sequence; identical to SEQ ID NO: 251
  Chemically Synthesized

SEQ ID NO: 265 - protein, 35 aa, Artificial Sequence; identical to SEQ ID NO: 251
  Chemically Synthesized

SEQ ID NO: 266 - protein, 35 aa, Artificial Sequence; identical to SEQ ID NO: 251
  Chemically Synthesized

SEQ ID NO: 267 - protein, 35 aa, Artificial Sequence; identical to SEQ ID NO: 251
  Chemically Synthesized

SEQ ID NO: 268 - protein, 35 aa, Artificial Sequence; identical to SEQ ID NO: 251
  Chemically Synthesized

SEQ ID NO: 269 - protein, 35 aa, Artificial Sequence; identical to SEQ ID NO: 251
  Chemically Synthesized

SEQ ID NO: 270 - protein, 35 aa, Artificial Sequence; identical to SEQ ID NO: 251
  Chemically Synthesized

SEQ ID NO: 271 - protein, 35 aa, Artificial Sequence; identical to SEQ ID NO: 251
  Chemically Synthesized

SEQ ID NO: 272 - protein, 35 aa, Artificial Sequence
  Chemically Synthesized
KKRSLEDNETEIEVSRDTWNNKNMRSLEPPRSKKR

SEQ ID NO: 273 - protein, 35 aa, Artificial Sequence; identical to SEQ ID NO: 272
  Chemically Synthesized

SEQ ID NO: 274 - protein, 40 aa, Artificial Sequence
  Chemically Synthesized
KKRVEKLDWMYAAPSTEGGALGGARIGERDMEEYLLGKKR

SEQ ID NO: 275 - protein, 40 aa, Artificial Sequence; identical to SEQ ID NO: 274
  Chemically Synthesized

SEQ ID NO: 276 - protein, 35 aa, Artificial Sequence; identical to SEQ ID NO: 272
  Chemically Synthesized

SEQ ID NO: 277 - protein, 35 aa, Artificial Sequence; identical to SEQ ID NO: 272
  Chemically Synthesized

SEQ ID NO: 278 - protein, 29 aa, Artificial Sequence
  Chemically Synthesized
KKRKRRSKKINKLTDGQIRINHVSSEKKR

SEQ ID NO: 279 - protein, 37 aa, Artificial Sequence
  Chemically Synthesized
KKRSKLTSKHAETADSQSSAASSDHESGQSQAHTKKR

SEQ ID NO: 280 - protein, 39 aa, Artificial Sequence
  Chemically Synthesized
KKRDAETADIGDQSEVESDTEELKKIMFGEKKKLNKKKR

SEQ ID NO: 281 - protein, 29 aa, Artificial Sequence
  Chemically Synthesized
KKRAGGTKRKKATAEPSDNDILSQMTKKR

SEQ ID NO: 282 - protein, 35 aa, Artificial Sequence; identical to SEQ ID NO: 272
  Chemically Synthesized

SEQ ID NO: 283 - protein, 33 aa, Artificial Sequence
  Chemically Synthesized
KKRVYYDDGLTEEQFLEAVEDDNMSLEDAIKKR

SEQ ID NO: 284 - protein, 43 aa, Artificial Sequence
  Chemically Synthesized
KKRSAKIKKATFDANKKKEVGISDLTLLSKISDESINENLKKR

SEQ ID NO: 285 - protein, 37 aa, Artificial Sequence
  Chemically Synthesized
KKRKRLESEQEQDQDEIASDSDMEDIDSDLENNSKKR

SEQ ID NO: 286 - protein, 26 aa, Artificial Sequence
  Chemically Synthesized
KKRGHNSIIGHEKTNALETLKKKKKR

SEQ ID NO: 287 - protein, 35 aa, Artificial Sequence; identical to SEQ ID NO: 251
  Chemically Synthesized

SEQ ID NO: 288 - protein, 35 aa, Artificial Sequence; identical to SEQ ID NO: 251
  Chemically Synthesized

SEQ ID NO: 289 - protein, 35 aa, Artificial Sequence
  Chemically Synthesized
KKRAHSSGERRSSVSKPARDPSDKPEESPSKKKKR

SEQ ID NO: 290 - protein, 42 aa, Artificial Sequence
  Chemically Synthesized
KKRLKSSLRFRKLEILLELPFFIPFEERVDLFYMFIALDKKR

SEQ ID NO: 291 - protein, 35 aa, Artificial Sequence
  Chemically Synthesized
KKRMQAVFTNVHKFKPDASRDESKETYYIGLKKKR

SEQ ID NO: 292 - protein, 35 aa, Artificial Sequence
  Chemically Synthesized
KKRKPTEVNDSENNSSEEDKKKGQNVTSETHSKKR

SEQ ID NO: 293 - protein, 42 aa, Artificial Sequence
  Chemically Synthesized
KKREAEAQWCRIHGQSCWKRDALPEAEPQWCRIHGQSCWKKR

SEQ ID NO: 294 - protein, 35 aa, Artificial Sequence; identical to SEQ ID NO: 251
  Chemically Synthesized

SEQ ID NO: 295 - protein, 35 aa, Artificial Sequence; identical to SEQ ID NO: 272
  Chemically Synthesized

SEQ ID NO: 296 - protein, 35 aa, Artificial Sequence; identical to SEQ ID NO: 251
  Chemically Synthesized

SEQ ID NO: 297 - protein, 35 aa, Artificial Sequence; identical to SEQ ID NO: 251
  Chemically Synthesized

SEQ ID NO: 298 - protein, 45 aa, Artificial Sequence
  Chemically Synthesized
KKRKDPDSDDWSESNSKENKIDNKHLNLLSSDSEIEQDYQKAKKR

SEQ ID NO: 299 - protein, 35 aa, Artificial Sequence; identical to SEQ ID NO: 251
  Chemically Synthesized

SEQ ID NO: 300 - protein, 35 aa, Artificial Sequence; identical to SEQ ID NO: 251
  Chemically Synthesized

SEQ ID NO: 301 - protein, 35 aa, Artificial Sequence
  Chemically Synthesized
KKRVIDDEDDKEVDTTLPGWGEWAGAGSKPKNKKR

SEQ ID NO: 302 - protein, 35 aa, Artificial Sequence; identical to SEQ ID NO: 251
  Chemically Synthesized

SEQ ID NO: 303 - protein, 35 aa, Artificial Sequence; identical to SEQ ID NO: 251
  Chemically Synthesized

SEQ ID NO: 304 - protein, 26 aa, Artificial Sequence
  Chemically Synthesized
KKRRRGNGKHLSRKEKRKMERADKKR

SEQ ID NO: 305 - protein, 35 aa, Artificial Sequence; identical to SEQ ID NO: 251
  Chemically Synthesized

SEQ ID NO: 306 - protein, 40 aa, Artificial Sequence
  Chemically Synthesized
KKRNGSMHNMYYASVPFLLFSNAYSIDFSRHVNEFLEKKR

SEQ ID NO: 307 - protein, 35 aa, Artificial Sequence; identical to SEQ ID NO: 272
  Chemically Synthesized

SEQ ID NO: 308 - protein, 35 aa, Artificial Sequence; identical to SEQ ID NO: 251
  Chemically Synthesized

SEQ ID NO: 309 - protein, 28 aa, Artificial Sequence
  Chemically Synthesized
KKRYMTTKQTRTVQNQTMPRSNTTTKKR

SEQ ID NO: 310 - protein, 37 aa, Artificial Sequence
  Chemically Synthesized
KKREFEAAPAKTYADFLRAYQSWNTFVNPDRPNLKKR

SEQ ID NO: 311 - protein, 37 aa, Artificial Sequence
  Chemically Synthesized
KKREFEAAPEKSYADFLRAYHSWNTFVNPDRPNLKKR

SEQ ID NO: 312 - protein, 37 aa, Artificial Sequence; identical to SEQ ID NO: 310
  Chemically Synthesized

SEQ ID NO: 313 - protein, 46 aa, Artificial Sequence
  Chemically Synthesized
KKRDKKKQLKLAKEEERQRREAERLAEQAAQKALEAKRQEEARKKR

SEQ ID NO: 314 - protein, 26 aa, Artificial Sequence
  Chemically Synthesized
KKREALLNIEEGRDVKGNRMVGMKKR

SEQ ID NO: 315 - protein, 35 aa, Artificial Sequence; identical to SEQ ID NO: 251
  Chemically Synthesized

SEQ ID NO: 316 - protein, 35 aa, Artificial Sequence; identical to SEQ ID NO: 251
  Chemically Synthesized

SEQ ID NO: 317 - protein, 35 aa, Artificial Sequence; identical to SEQ ID NO: 272
  Chemically Synthesized

SEQ ID NO: 318 - protein, 35 aa, Artificial Sequence; identical to SEQ ID NO: 251
  Chemically Synthesized

SEQ ID NO: 319 - protein, 35 aa, Artificial Sequence; identical to SEQ ID NO: 251
  Chemically Synthesized

SEQ ID NO: 320 - protein, 35 aa, Artificial Sequence; identical to SEQ ID NO: 251
  Chemically Synthesized

SEQ ID NO: 321 - protein, 35 aa, Artificial Sequence; identical to SEQ ID NO: 251
  Chemically Synthesized

SEQ ID NO: 322 - protein, 35 aa, Artificial Sequence; identical to SEQ ID NO: 251
  Chemically Synthesized

SEQ ID NO: 323 - protein, 35 aa, Artificial Sequence; identical to SEQ ID NO: 272
  Chemically Synthesized

SEQ ID NO: 324 - protein, 41 aa, Artificial Sequence
  Chemically Synthesized
KKRKLGPKAPNPLSVKKKKKVNSPSDEVKDKEDTSKEKKKR

SEQ ID NO: 325 - protein, 35 aa, Artificial Sequence; identical to SEQ ID NO: 251
  Chemically Synthesized

SEQ ID NO: 326 - protein, 35 aa, Artificial Sequence; identical to SEQ ID NO: 272
  Chemically Synthesized

SEQ ID NO: 327 - protein, 35 aa, Artificial Sequence; identical to SEQ ID NO: 251
  Chemically Synthesized

SEQ ID NO: 328 - protein, 35 aa, Artificial Sequence; identical to SEQ ID NO: 272
  Chemically Synthesized

SEQ ID NO: 329 - protein, 35 aa, Artificial Sequence; identical to SEQ ID NO: 272
  Chemically Synthesized

SEQ ID NO: 330 - protein, 31 aa, Artificial Sequence
  Chemically Synthesized
KKRKGGNGSSDEEEDSDDDMAGKDKGKRKKR

SEQ ID NO: 331 - protein, 45 aa, Artificial Sequence
  Chemically Synthesized
KKRKRKHGGSGNAALTSANAAKSLVKTTLSSKGEASAEKQEMKKR

SEQ ID NO: 332 - protein, 26 aa, Artificial Sequence
  Chemically Synthesized
KKRKADRRSDKEDDKLGKKEKKSKKR

SEQ ID NO: 333 - protein, 44 aa, Artificial Sequence
  Chemically Synthesized
KKRDKKEKKERRDKKEKKEKRRIEKAAAESGAETGDSISEEKKR

SEQ ID NO: 334 - protein, 46 aa, Artificial Sequence
  Chemically Synthesized
KKRTAPKDDDFVLTLSDDENDVFSGINEDGDDHLDEETAKSTTKKR

SEQ ID NO: 335 - protein, 42 aa, Artificial Sequence
  Chemically Synthesized
KKRVDEAREKRVGRFRDGMGSKKELKGREDIRKARIEKEKKR

SEQ ID NO: 336 - protein, 34 aa, Artificial Sequence
  Chemically Synthesized
KKRIDRVDWMYATPATTGSGSAAEMEDYLLGKKR

SEQ ID NO: 337 - protein, 34 aa, Artificial Sequence
  Chemically Synthesized
KKRKTSDRETQNVTTKKQKIETIERKKSSLKKKR

SEQ ID NO: 338 - protein, 45 aa, Artificial Sequence
  Chemically Synthesized
KKRAAARDDDFVLTLSDDENDIFENGVEEDGDNAQEDTLSSSKKR

SEQ ID NO: 339 - protein, 42 aa, Artificial Sequence; identical to SEQ ID NO: 238
  Chemically Synthesized

SEQ ID NO: 340 - protein, 41 aa, Artificial Sequence
  Chemically Synthesized
KKRLQQLAKEEERKRKEEELKAKEEEQRLQKEKLKAEQKKR

SEQ ID NO: 341 - protein, 37 aa, Artificial Sequence
  Chemically Synthesized
KKRSEIERYSKMFWQNYQKIEGYEKYLSQIEAVEKKR

SEQ ID NO: 342 - protein, 27 aa, Artificial Sequence
  Chemically Synthesized
KKRVAPLLVSTSAAPKNVLQKPLEKKR

SEQ ID NO: 343 - protein, 26 aa, Artificial Sequence
  Chemically Synthesized
KKRAAKKRQEEEELERQKMMMSRKKR

SEQ ID NO: 344 - protein, 46 aa, Artificial Sequence
  Chemically Synthesized
KKRSAEDEEKDLKKIMMSNKQRKLYKKMQYGIDKKEARQDDLTKKR

SEQ ID NO: 345 - protein, 44 aa, Artificial Sequence
  Chemically Synthesized
KKRGSEAVEESDSDSEESESESDDDKKSRKSSKKEKKDKKSKKR

SEQ ID NO: 346 - protein, 41 aa, Artificial Sequence
  Chemically Synthesized
KKRAEKSRTPLTSSTAVISDRPVASVSADTTLVGSVASKKR

SEQ ID NO: 347 - protein, 34 aa, Artificial Sequence
  Chemically Synthesized
KKRFSGSSVTVAMTTAAAAAARLTAFKVTKPKKR

SEQ ID NO: 348 - protein, 28 aa, Artificial Sequence
  Chemically Synthesized
KKREVGVSDLTLLSKVSEEAINENLKKR

SEQ ID NO: 349 - protein, 33 aa, Artificial Sequence
  Chemically Synthesized
KKRLKRTKVPSKIWVDNLNMEYIYAKGESIKKR

SEQ ID NO: 350 - protein, 39 aa, Artificial Sequence
  Chemically Synthesized
KKRYKSELDRAEAIERQLIREEEHLKSLQEKGETQAKKR

SEQ ID NO: 351 - protein, 41 aa, Artificial Sequence
  Chemically Synthesized
KKRKLEVKSDQQTPPATQSEINHTSSVRLEENIQGIKRKKR

SEQ ID NO: 352 - protein, 39 aa, Artificial Sequence
  Chemically Synthesized
KKRGQAAKEAVEVDLVDVGDYVKKATERFQHTVELHKKR

SEQ ID NO: 353 - protein, 33 aa, Artificial Sequence
  Chemically Synthesized
KKRQRKRRREAGSGDEEDEGVSDEVLAARAKKR

SEQ ID NO: 354 - protein, 42 aa, Artificial Sequence
  Chemically Synthesized
KKRVAEAKEKRIGKYKDGEGSKRELKTATDIRKARAVAEKKR

SEQ ID NO: 355 - protein, 34 aa, Artificial Sequence
  Chemically Synthesized
KKRDPPPRPKYEVFTDAQLSREIASYGFKPIKKR

SEQ ID NO: 356 - protein, 39 aa, Artificial Sequence
  Chemically Synthesized
KKRGISALMAKAKEASDVATNGYFKHWDGGVSEDDEKKR

SEQ ID NO: 357 - protein, 28 aa, Artificial Sequence
  Chemically Synthesized
KKRQSKRLTTRKREGMLKRARANERKKR

SEQ ID NO: 358 - protein, 27 aa, Artificial Sequence
  Chemically Synthesized
KKRKKKTVKELNRIRRASRISKKEKKR

SEQ ID NO: 359 - protein, 38 aa, Artificial Sequence
  Chemically Synthesized
KKRKKKTVKELNRIRRASRISKKEKKRIFKRYIGMKKR

SEQ ID NO: 360 - protein, 35 aa, Artificial Sequence; identical to SEQ ID NO: 251
  Chemically Synthesized

SEQ ID NO: 361 - protein, 41 aa, Artificial Sequence
  Chemically Synthesized
KKRTGSQYSYYNGGHNVESTNENKLVDASDLLANVDILKKR

SEQ ID NO: 362 - protein, 35 aa, Artificial Sequence; identical to SEQ ID NO: 251
  Chemically Synthesized

SEQ ID NO: 363 - protein, 35 aa, Artificial Sequence; identical to SEQ ID NO: 251
  Chemically Synthesized

SEQ ID NO: 364 - protein, 40 aa, Artificial Sequence
  Chemically Synthesized
KKRVWSREKRLLSEMAITNHSPLLNVDDYRKFREDLWKKR

SEQ ID NO: 365 - protein, 33 aa, Artificial Sequence
  Chemically Synthesized
KKRKRRAKAAEREAQEAEELSMELGLDENLKKR

SEQ ID NO: 366 - protein, 35 aa, Artificial Sequence
  Chemically Synthesized
KKRRRSSSYSPSPVKKKKKKSSKKHKRRRSFSKKR

SEQ ID NO: 367 - protein, 40 aa, Artificial Sequence
  Chemically Synthesized
KKRKKPKGKETFEPEDKTVKQEQINTEPLEDTVLSPTKKR

SEQ ID NO: 368 - protein, 42 aa, Artificial Sequence
  Chemically Synthesized
KKRKKQSQESRMPETVPQEEMPGPPLNSESGEEAPTGRDKKR

SEQ ID NO: 369 - protein, 43 aa, Artificial Sequence
  Chemically Synthesized
KKRKRQKGTEGMEPEEGVTVESQPQVKVEPLEEAIPLPPTKKR

SEQ ID NO: 370 - protein, 26 aa, Artificial Sequence
  Chemically Synthesized
KKRKLDPEIVPEEKDCGDAEGNSKKR

SEQ ID NO: 371 - protein, 46 aa, Artificial Sequence
  Chemically Synthesized
KKRSSIWQFFSRLFSSSSNTTKKPEPPVNLKYNAPTSHVTPSVKKR

SEQ ID NO: 372 - protein, 36 aa, Artificial Sequence
  Chemically Synthesized
KKRRAPPPPGSGPPVQDKASEKVSLGSQIDLQKKKR

SEQ ID NO: 373 - protein, 37 aa, Artificial Sequence
  Chemically Synthesized
KKRQRSESRSASEHSSSAESERSYKKSKKHKKKSKKR

SEQ ID NO: 374 - protein, 32 aa, Artificial Sequence
  Chemically Synthesized
KKRKALEFVTNPDIAAKKKMKKHKNKSEAKKR

SEQ ID NO: 375 - protein, 45 aa, Artificial Sequence
  Chemically Synthesized
KKRFRQLSILVHPDKNQDDADRAQKAFEAVDKAYKLLLDQEQKKR

SEQ ID NO: 376 - protein, 45 aa, Artificial Sequence
  Chemically Synthesized
KKRQQARKTASVLSKDDVAPESGDTTVKKPESKKEQTPEHGKKKR

SEQ ID NO: 377 - protein, 42 aa, Artificial Sequence
  Chemically Synthesized
KKRARLEEENEELRQRLIETELAKQVLQTELERPREHSLKKR

SEQ ID NO: 378 - protein, 35 aa, Artificial Sequence
  Chemically Synthesized
KKRRHRSKVNGLQRGRKKDRPRKHLTLNNKVQKKR

SEQ ID NO: 379 - protein, 30 aa, Artificial Sequence
  Chemically Synthesized
KKRRKEKKVKHKKKGKKQKHCRRHKQTKKR

SEQ ID NO: 380 - protein, 26 aa, Artificial Sequence
  Chemically Synthesized
KKRPRNSYKCGTNTMEREESEQTKKR

SEQ ID NO: 381 - protein, 35 aa, Artificial Sequence
  Chemically Synthesized
KKRQTQSESSNYDSELEKEIKSMSKIGAARTTKKR

SEQ ID NO: 382 - protein, 41 aa, Artificial Sequence
  Chemically Synthesized
KKRGRKPGSVVAAAAAEAKKKAVKESSIRSVQETVLPIKKR

SEQ ID NO: 383 - protein, 27 aa, Artificial Sequence
  Chemically Synthesized
KKRGDGFVNESRLQKIVSVIDEEIKKR

SEQ ID NO: 384 - protein, 27 aa, Artificial Sequence
  Chemically Synthesized
KKRKERFGIVTSSAGTGTTEDTEAKKR

SEQ ID NO: 385 - protein, 40 aa, Artificial Sequence
  Chemically Synthesized
KKRKREESVEQKRSKQNATKLSALLFKHKEQLRAEILKKR

SEQ ID NO: 386 - protein, 33 aa, Artificial Sequence
  Chemically Synthesized
KKRKEEERKKKETDQKKEAVAPVQEESDLEKKR

SEQ ID NO: 387 - protein, 43 aa, Artificial Sequence
  Chemically Synthesized
KKRHKSSSSSSSSSSDSDSSSDSQSSSDSSDSESATEEKSKKR

SEQ ID NO: 388 - protein, 34 aa, Artificial Sequence
  Chemically Synthesized
KKRKKDFQHLISSPLKKSRICDETANATSTLKKR

SEQ ID NO: 389 - protein, 37 aa, Artificial Sequence
  Chemically Synthesized
KKRKKDFQHLISSPLKKSRICDETANATSTLKKRKKR

SEQ ID NO: 390 - protein, 45 aa, Artificial Sequence
  Chemically Synthesized
KKRDQTASAPATPLVNKHRPTFTRSNTISKPYISNTLPSDAPKKR

SEQ ID NO: 391 - protein, 36 aa, Artificial Sequence
  Chemically Synthesized
KKRKNKSSKRKHRKYSDSDSNSESDTNSDSDDDKKR

SEQ ID NO: 392 - protein, 39 aa, Artificial Sequence
  Chemically Synthesized
KKRRQKEEEEATASERNDADEKHPEHAEQNIRKSKKKKR

SEQ ID NO: 393 - protein, 46 aa, Artificial Sequence
  Chemically Synthesized
KKRQQQEEEDLNLEDRGEETVLGGGTREAESRACSDGRSRKSKKKR

SEQ ID NO: 394 - protein, 38 aa, Artificial Sequence
  Chemically Synthesized
KKRIELKHDKKARAMAKRTKDNFHGYNGIPIEEKSKKR

SEQ ID NO: 395 - protein, 41 aa, Artificial Sequence
  Chemically Synthesized
KKRIERFYNCLQHALERETMTNLHPKIKEKNNSSYIHKKKR

SEQ ID NO: 396 - protein, 26 aa, Artificial Sequence
  Chemically Synthesized
KKRRKGSGSEQEGEDEEGGERKKKKR

SEQ ID NO: 397 - protein, 27 aa, Artificial Sequence
  Chemically Synthesized
KKRRRHPKGEEGSDDDETENGPKPKKR

SEQ ID NO: 398 - protein, 37 aa, Artificial Sequence
  Chemically Synthesized
KKRGGGGGRRSKKGGEFDEFVNDDTDDDLPISKKKKR

SEQ ID NO: 399 - protein, 36 aa, Artificial Sequence
  Chemically Synthesized
KKRTALHLACANGNSEVVSLLLDRQCQLHVFDSKKR

SEQ ID NO: 400 - protein, 39 aa, Artificial Sequence
  Chemically Synthesized
KKRKRKEEGEKEKKPRKKVPKQLGVVALNSHKSEKKKKR

SEQ ID NO: 401 - protein, 46 aa, Artificial Sequence
  Chemically Synthesized
KKRLDGIEEVEREITRGRSRKGSELTCPEDNKIKELTLEIERLKKR

SEQ ID NO: 402 - protein, 33 aa, Artificial Sequence
  Chemically Synthesized
KKRKKSYPDDKPLSSESSSESDYEEDVQAKKKR

SEQ ID NO: 403 - protein, 43 aa, Artificial Sequence
  Chemically Synthesized
KKRKALEAKKEEEEIQREMVKLRREIIERRRTVKAAWKIEKKR

SEQ ID NO: 404 - protein, 37 aa, Artificial Sequence
  Chemically Synthesized
KKRKRCGVCEPCQQKTNCGECTYCKNRKNSHQICKKR

SEQ ID NO: 405 - protein, 39 aa, Artificial Sequence
  Chemically Synthesized
KKRMEAEQEMVRMVRAATLIQALWKGYLVRSLLRSKKKR

SEQ ID NO: 406 - protein, 31 aa, Artificial Sequence
  Chemically Synthesized
KKRGRTPKTLISHPISAPSKTAEPLKFPKKR

SEQ ID NO: 407 - protein, 27 aa, Artificial Sequence
  Chemically Synthesized
KKRVGDGSVLRTIHGKEMSKIARKKKR

SEQ ID NO: 408 - protein, 35 aa, Artificial Sequence
  Chemically Synthesized
KKRKDEGKSRTTLPERPLTEVKAETRAEEAPEKKR

SEQ ID NO: 409 - protein, 32 aa, Artificial Sequence
  Chemically Synthesized
KKRKSEDGTPAEDGTPAATGGSQPPSMGRKKR

SEQ ID NO: 410 - protein, 35 aa, Artificial Sequence
  Chemically Synthesized
KKRKKRKSEDGTPAEDGTPAATGGSQPPSMGRKKR

SEQ ID NO: 411 - protein, 33 aa, Artificial Sequence
  Chemically Synthesized
KKRKKISGPNPLSCLKKKKKAPDTQSSASEKKR

SEQ ID NO: 412 - protein, 32 aa, Artificial Sequence
  Chemically Synthesized
KKRSREDAGDNDDTEGAIGVRNKVAGGKMKKR

SEQ ID NO: 413 - protein, 42 aa, Artificial Sequence
  Chemically Synthesized
KKRKGSSSQAPASKKLNKEELPVIPKGKPKSGRVWKDRSKKR

SEQ ID NO: 414 - protein, 44 aa, Artificial Sequence
  Chemically Synthesized
KKRSKLKHRDLEVSCEPDGFEMNFQCAPPLPSDTDQPQETVKKR

SEQ ID NO: 415 - protein, 45 aa, Artificial Sequence
  Chemically Synthesized
KKRRKKSAGERLKEEKPKKSKTSGASKTKGKSKLNTITPVVGKKR

SEQ ID NO: 416 - protein, 29 aa, Artificial Sequence
  Chemically Synthesized
KKRKKGEKQIPGEEKGRKRRRVKEDKKKR

SEQ ID NO: 417 - protein, 32 aa, Artificial Sequence
  Chemically Synthesized
KKREAEEKEKRVRIAKELAERERLERQQKKKR

SEQ ID NO: 418 - protein, 31 aa, Artificial Sequence
  Chemically Synthesized
KKRAATTVLQELKKLPPLPVVEKPKLFFKKR

SEQ ID NO: 419 - protein, 34 aa, Artificial Sequence
  Chemically Synthesized
KKRGLTGDSKKATKESGLISTKKRKMVEMLEKKR

SEQ ID NO: 420 - protein, 27 aa, Artificial Sequence
  Chemically Synthesized
KKRKREKKELKLENHQENSRNQKPKKR

SEQ ID NO: 421 - protein, 44 aa, Artificial Sequence
  Chemically Synthesized
KKRSYKDFLREEEEIAAQVRNSSKKKLKDSELYFLGTDTHKKKR

SEQ ID NO: 422 - protein, 34 aa, Artificial Sequence
  Chemically Synthesized
KKRQLLDSDEEQEEDEGRNRAPELGAPGIQKKKR

SEQ ID NO: 423 - protein, 38 aa, Artificial Sequence
  Chemically Synthesized
KKRGKKKHIKEEPLSEEEPCTSTAIASPEKKKKKKKKR

SEQ ID NO: 424 - protein, 39 aa, Artificial Sequence
  Chemically Synthesized
KKRGRPKKQPLLTVETIHEGTSTSPVSPISREFPGTKKR

SEQ ID NO: 425 - protein, 40 aa, Artificial Sequence
  Chemically Synthesized
KKRKGKVKKTKKKKTSNKKEKTKKSKSKNKKDAKKKAKKR

SEQ ID NO: 426 - protein, 41 aa, Artificial Sequence
  Chemically Synthesized
KKRKFTKEDAIYGVFNDGWGDYEDEEESKMTEEEYYKMKKR

SEQ ID NO: 427 - protein, 32 aa, Artificial Sequence
  Chemically Synthesized
KKRKRATTTEEPQGSRNELVALENIEGIYKKR

SEQ ID NO: 428 - protein, 38 aa, Artificial Sequence
  Chemically Synthesized
KKRGPKKKKYKPEAAEVEKKNEEGDTVKENPIAEAKKR

SEQ ID NO: 429 - protein, 40 aa, Artificial Sequence
  Chemically Synthesized
KKRINEVSTTEGAPAEKKKKVEKWLNTSSEDGEGTKKKKR

SEQ ID NO: 430 - protein, 32 aa, Artificial Sequence
  Chemically Synthesized
KKRNFDEIDRSSMPFPYATKRFYHLSSFDKKR

SEQ ID NO: 431 - protein, 46 aa, Artificial Sequence
  Chemically Synthesized
KKRKNIKLFLNIINSNEYINVNKIFHGKCIYELPFYVNKERIKKKR

SEQ ID NO: 432 - protein, 26 aa, Artificial Sequence
  Chemically Synthesized
KKRKAMVEELIKRGYAPDPIADWKKR

SEQ ID NO: 433 - protein, 44 aa, Artificial Sequence
  Chemically Synthesized
KKRRGRKPKKKDDPKMELKDEVKDLKDFVVEESTSASSSAPKKR

SEQ ID NO: 434 - protein, 32 aa, Artificial Sequence
  Chemically Synthesized
KKRLEKENRKIKEEDDEDSDDEDDEKAKKKKR

SEQ ID NO: 435 - protein, 44 aa, Artificial Sequence
  Chemically Synthesized
KKRKRGPKKKKFKPEVAGKAAETENDDVAAAPEEADPIAEAKKR

SEQ ID NO: 436 - protein, 46 aa, Artificial Sequence
  Chemically Synthesized
KKRKITDEKDAQHVPAEKREKVENWLKKSTEKPTSSQSDAEKKKKR

SEQ ID NO: 437 - protein, 29 aa, Artificial Sequence
  Chemically Synthesized
KKRDDNKDKEGSSMDKLREESRRQYLKKR

SEQ ID NO: 438 - protein, 35 aa, Artificial Sequence
  Chemically Synthesized
KKRVTSKSRTKRVKMFKQCQWVDADNQRDIKRKKR

SEQ ID NO: 439 - protein, 38 aa, Artificial Sequence
  Chemically Synthesized
KKRMTEKDISSSESSISESKSLNCSASNQNENEKRKKR

SEQ ID NO: 440 - protein, 35 aa, Artificial Sequence; identical to SEQ ID NO: 438
  Chemically Synthesized

SEQ ID NO: 441 - protein, 38 aa, Artificial Sequence; identical to SEQ ID NO: 439
  Chemically Synthesized

SEQ ID NO: 442 - protein, 35 aa, Artificial Sequence; identical to SEQ ID NO: 438
  Chemically Synthesized

SEQ ID NO: 443 - protein, 38 aa, Artificial Sequence; identical to SEQ ID NO: 439
  Chemically Synthesized

SEQ ID NO: 444 - protein, 35 aa, Artificial Sequence; identical to SEQ ID NO: 438
  Chemically Synthesized

SEQ ID NO: 445 - protein, 38 aa, Artificial Sequence; identical to SEQ ID NO: 439
  Chemically Synthesized

SEQ ID NO: 446 - protein, 34 aa, Artificial Sequence
  Chemically Synthesized
KKRGRPKKPKDENESDYNNTSFSDSNTDGTPKKR

SEQ ID NO: 447 - protein, 30 aa, Artificial Sequence
  Chemically Synthesized
KKRGRPSKASVGGKSSTAAVAAISPGIKKR

SEQ ID NO: 448 - protein, 32 aa, Artificial Sequence
  Chemically Synthesized
KKRANRKKANNNKKRASNNRKKANNNNNNKKR

SEQ ID NO: 449 - protein, 41 aa, Artificial Sequence
  Chemically Synthesized
KKRDWYIQPTCARSGDGLYQGLDWLSDYIFDKKNKKKGKKR

SEQ ID NO: 450 - protein, 35 aa, Artificial Sequence
  Chemically Synthesized
KKRHLEDSLDMLNEEIVKLRAAEEIRLTDQEDKKR

SEQ ID NO: 451 - protein, 35 aa, Artificial Sequence
  Chemically Synthesized
KKRNNVFLTITDVIGRVVVSQSAGSCKITTKKKKR

SEQ ID NO: 452 - protein, 44 aa, Artificial Sequence
  Chemically Synthesized
KKRYYLFFSKKRNNVFLTITDVIGRVVVSQSAGSCKITTKKKKR

SEQ ID NO: 453 - protein, 37 aa, Artificial Sequence
  Chemically Synthesized
KKREIEIQQQLELQEETTLEIRERNVSLEQEVELKKR

SEQ ID NO: 454 - protein, 43 aa, Artificial Sequence
  Chemically Synthesized
KKRWFILKGGDLSYYKTKGELVPLGVIHLNTSGHIKNSDRKKR

SEQ ID NO: 455 - protein, 45 aa, Artificial Sequence
  Chemically Synthesized
KKRPNRLIIDQSDNDDNSMVMLSQAKMDELGLFRGDSVILKGKKR

SEQ ID NO: 456 - protein, 31 aa, Artificial Sequence
  Chemically Synthesized
KKRKGKGKKRGKGRRRGSKGRKKKKGKGKKR

SEQ ID NO: 457 - protein, 35 aa, Artificial Sequence
  Chemically Synthesized
KKRARSPSKKARRRSRSTKKTAAKRRKRSSSPKKR

SEQ ID NO: 458 - protein, 26 aa, Artificial Sequence
  Chemically Synthesized
KKREAEKKKCAKLAKKEKEAAEKKKR

SEQ ID NO: 459 - protein, 27 aa, Artificial Sequence
  Chemically Synthesized
KKRCKDLAKNKKKGHKKKGRNENRKKR

SEQ ID NO: 460 - protein, 35 aa, Artificial Sequence
  Chemically Synthesized
KKRKEAAEKKKCEKAAKKRKEAAEKKKCEKSAKKR

SEQ ID NO: 461 - protein, 35 aa, Artificial Sequence
  Chemically Synthesized
KKRKEEAEKKKCEKTAKKRKEAAEKKKCEKAAKKR

SEQ ID NO: 462 - protein, 35 aa, Artificial Sequence
  Chemically Synthesized
KKRKEAAEKKKCEKAAKKRKEEAEKKKCEKTAKKR

SEQ ID NO: 463 - protein, 35 aa, Artificial Sequence
  Chemically Synthesized
KKRKEEAEKKKCEKTAKKRKETAEKKKCEKAAKKR

SEQ ID NO: 464 - protein, 35 aa, Artificial Sequence
  Chemically Synthesized
KKRKETAEKKKCEKAAKKRKQAAEKKKCEKAAKKR

SEQ ID NO: 465 - protein, 29 aa, Artificial Sequence
  Chemically Synthesized
KKRGSKTSELKQNETTDAVVVNNEKVKKR

SEQ ID NO: 466 - protein, 26 aa, Artificial Sequence
  Chemically Synthesized
KKRKSAIDVLKMPLFDILRSSPPKKR

SEQ ID NO: 467 - protein, 42 aa, Artificial Sequence
  Chemically Synthesized
KKRFNLNLEEARQAFQTFKPDWNKIRYDAMKMQTSLGQMKKR

SEQ ID NO: 468 - protein, 38 aa, Artificial Sequence
  Chemically Synthesized
KKRSDKRARSESKSRSRSGGRRSRSNSPPNRSPSPKKR

SEQ ID NO: 469 - protein, 34 aa, Artificial Sequence
  Chemically Synthesized
KKRGVVLKPSVDEETDRRRMLNRIAAVRYREKKR

SEQ ID NO: 470 - protein, 36 aa, Artificial Sequence
  Chemically Synthesized
KKRFHEMAEKDKQRYEAEMQNYVPPKGAVVGRGKKR

SEQ ID NO: 471 - protein, 36 aa, Artificial Sequence
  Chemically Synthesized
KKRQHSSRSNESVSSSTSTEKSHKKTKKTKMKEKKR

SEQ ID NO: 472 - protein, 37 aa, Artificial Sequence; identical to SEQ ID NO: 453
  Chemically Synthesized

SEQ ID NO: 473 - protein, 30 aa, Artificial Sequence
  Chemically Synthesized
KKRMDDFVSQVGEDRLATYKPFTEDPSKKR

SEQ ID NO: 474 - protein, 28 aa, Artificial Sequence
  Chemically Synthesized
KKRSKKRNSIDSGRKDKSKKRKSKKKKR

SEQ ID NO: 475 - protein, 31 aa, Artificial Sequence
  Chemically Synthesized
KKRDSKNRRSHSKSDENEEGEEDDEERRKKR

SEQ ID NO: 476 - protein, 42 aa, Artificial Sequence
  Chemically Synthesized
KKRLFEDFTNLYIEDDCLLSCSFSFFIYNKSIHLHFNVDKKR

SEQ ID NO: 477 - protein, 26 aa, Artificial Sequence
  Chemically Synthesized
KKRIPNATEEEIEILEGMLCWNPKKR

SEQ ID NO: 478 - protein, 46 aa, Artificial Sequence
  Chemically Synthesized
KKRKKDRDHNNNNNNNNNNNNNNNEQTSDSSDSSDSDSESRSKKKR

SEQ ID NO: 479 - protein, 26 aa, Artificial Sequence
  Chemically Synthesized
KKRAAEQKIIDDEKARLKSIENSKKR

SEQ ID NO: 480 - protein, 38 aa, Artificial Sequence
  Chemically Synthesized
KKRKCNFSSPLLFSPFKYGVTSPFSPSKMKLKSPFKKR

SEQ ID NO: 481 - protein, 36 aa, Artificial Sequence
  Chemically Synthesized
KKRLKREKRLKEKQDLLLIKLEKQKEKQLEEQMKKR

SEQ ID NO: 482 - protein, 27 aa, Artificial Sequence
  Chemically Synthesized
KKRIKFTHMVGRGQYGKVYDALYDKKR

SEQ ID NO: 483 - protein, 35 aa, Artificial Sequence
  Chemically Synthesized
KKRREKEARKMKRAGGRFKSRATGANAEEKRAKKR

SEQ ID NO: 484 - protein, 39 aa, Artificial Sequence
  Chemically Synthesized
KKRLQKEEQDRLAAAELERKRLEKEAEEKRIAQELEKKR

SEQ ID NO: 485 - protein, 31 aa, Artificial Sequence
  Chemically Synthesized
KKRKITSSEYGMSLEFFKKNPKKVVQNLKKR

SEQ ID NO: 486 - protein, 41 aa, Artificial Sequence
  Chemically Synthesized
KKRDLIKNNKLIHNVDVNYINMITNDNHISSEKCRDIKKKR

SEQ ID NO: 487 - protein, 46 aa, Artificial Sequence
  Chemically Synthesized
KKRIYGYLFYTTLLKNITSLNNLFVHYILNNYFFFHSKSMYMLKKR

SEQ ID NO: 488 - protein, 31 aa, Artificial Sequence
  Chemically Synthesized
KKRIFIYENTVYYTPDDCVFCTQLNCTIKKR

SEQ ID NO: 489 - protein, 44 aa, Artificial Sequence
  Chemically Synthesized
KKRRNEETRSARSVGIAAADARQAAIVAEKTSGPSLLEIHQKKR

SEQ ID NO: 490 - protein, 39 aa, Artificial Sequence
  Chemically Synthesized
KKRPGTTSKKSIATVTASPEMSSKTTQMEPEQDGEGKKR

SEQ ID NO: 491 - protein, 29 aa, Artificial Sequence
  Chemically Synthesized
KKRLARGGHVEDPTADPLDISLPSSKKKR

SEQ ID NO: 492 - protein, 27 aa, Artificial Sequence
  Chemically Synthesized
KKRSDESDDDNIGLVARGSPRFFGKKR

SEQ ID NO: 493 - protein, 45 aa, Artificial Sequence
  Chemically Synthesized
KKRADDEDILLGERGSPRFFGKKRANDENISFSLRGSPRFFGKKR

SEQ ID NO: 494 - protein, 46 aa, Artificial Sequence
  Chemically Synthesized
KKRSDDNVALDLRGSPRFFGKRQSSDLDDEISVALRGSPRFFGKKR

SEQ ID NO: 495 - protein, 34 aa, Artificial Sequence
  Chemically Synthesized
KKRTEDGRPTLSAHPARFSPEDKYSRQRLTIKKR

SEQ ID NO: 496 - protein, 32 aa, Artificial Sequence
  Chemically Synthesized
KKRRVEKKKSKTKWTERKQKVEHDKEKRQKKR

SEQ ID NO: 497 - protein, 37 aa, Artificial Sequence
  Chemically Synthesized
KKRPRQPRKRIVMVEEVKRKIRTPIKEEEEVQERKKR

SEQ ID NO: 498 - protein, 33 aa, Artificial Sequence
  Chemically Synthesized
KKRVQILYIESESEDEDEQDSHDKSLDSPEKKR

SEQ ID NO: 499 - protein, 34 aa, Artificial Sequence
  Chemically Synthesized
KKRKRGVVNTKAYKETKPAVKKETKATPALHKKR

SEQ ID NO: 500 - protein, 40 aa, Artificial Sequence
  Chemically Synthesized
KKRKCVITLDEKQVESKRLKKEESNVEATSRPPAQSPKKR

SEQ ID NO: 501 - protein, 37 aa, Artificial Sequence
  Chemically Synthesized
KKRKKPQTAAKSSSRSDSDSDWANNKAGAPSSKKKKR

SEQ ID NO: 502 - protein, 39 aa, Artificial Sequence
  Chemically Synthesized
KKRKRKEEGEKEKKPRKKVPKQLGVMALNSHKSEKKKKR

SEQ ID NO: 503 - protein, 33 aa, Artificial Sequence
  Chemically Synthesized
KKRKKVSGPNPLSCLKKKKKTQDTNSSASEKKR

SEQ ID NO: 504 - protein, 33 aa, Artificial Sequence; identical to SEQ ID NO: 386
  Chemically Synthesized

SEQ ID NO: 505 - protein, 40 aa, Artificial Sequence
  Chemically Synthesized
KKRLEDEQEMVRMVRAATLIQALWKGYLVRSMLKSKKKKR

SEQ ID NO: 506 - protein, 32 aa, Artificial Sequence
  Chemically Synthesized
KKRSREDVGDNDDTEGAIGVRNKVAGGKMKKR

SEQ ID NO: 507 - protein, 39 aa, Artificial Sequence
  Chemically Synthesized
KKREEMEEENRKIIEFAKLQQQREEDRMAKVQEKVKKKR

SEQ ID NO: 508 - protein, 31 aa, Artificial Sequence
  Chemically Synthesized
KKRRQYQEEEVLDGPGVNTAQKAKKKKQKKR

SEQ ID NO: 509 - protein, 37 aa, Artificial Sequence
  Chemically Synthesized
KKRKQKEEEEPTTTERSAEKYSEHTDESIRKSKKKKR

SEQ ID NO: 510 - protein, 41 aa, Artificial Sequence
  Chemically Synthesized
KKREGSSAQAPASKKPKEEIPVIPKGKPKSGRVWKDRSKKR

SEQ ID NO: 511 - protein, 26 aa, Artificial Sequence
  Chemically Synthesized
KKRKLDPEIVPEEKDCGDDEGNSKKR

SEQ ID NO: 512 - protein, 39 aa, Artificial Sequence
  Chemically Synthesized
KKRMEAEQEMVRMVRAATLIQAFWKGYLVRSLLRSKKKR

SEQ ID NO: 513 - protein, 45 aa, Artificial Sequence
  Chemically Synthesized
KKRSTSVMSFFSKVSWNLRLQKQEPLKNVFFILAETARDPSVKKR

SEQ ID NO: 514 - protein, 41 aa, Artificial Sequence
  Chemically Synthesized
KKRHKKEKRKKEKDRGRRLDSSLAPAPIQHDSDSSTCCKKR

SEQ ID NO: 515 - protein, 40 aa, Artificial Sequence
  Chemically Synthesized
KKRIERFYHCLQHALEKETVSTTSQPKEKVNTSYIRKKKR

SEQ ID NO: 516 - protein, 33 aa, Artificial Sequence; identical to SEQ ID NO: 386
  Chemically Synthesized

SEQ ID NO: 517 - protein, 27 aa, Artificial Sequence
  Chemically Synthesized
KKRKERFGIVTSSAGTGTTEDTEAKKR

SEQ ID NO: 518 - protein, 29 aa, Artificial Sequence
  Chemically Synthesized
KKRKKGEKQIPGEEKGRKRRRVKEDKKKR

SEQ ID NO: 519 - protein, 42 aa, Artificial Sequence
  Chemically Synthesized
KKRKGSSSLAPASKKLNKEELPVIPKGKPKSGRVWKDRSKKR

SEQ ID NO: 520 - protein, 45 aa, Artificial Sequence; identical to SEQ ID NO: 376
  Chemically Synthesized

SEQ ID NO: 521 - protein, 35 aa, Artificial Sequence
  Chemically Synthesized
KKRKDEGKSRTTPPERPLTEVKAETRAEEAPEKKR

SEQ ID NO: 522 - protein, 35 aa, Artificial Sequence
  Chemically Synthesized
KKRKEEGKSRTTPPERPLTEVKAETRAEEAPEKKR

SEQ ID NO: 523 - protein, 35 aa, Artificial Sequence; identical to SEQ ID NO: 381
  Chemically Synthesized

SEQ ID NO: 524 - protein, 35 aa, Artificial Sequence; identical to SEQ ID NO: 381
  Chemically Synthesized

SEQ ID NO: 525 - protein, 35 aa, Artificial Sequence; identical to SEQ ID NO: 408
  Chemically Synthesized

SEQ ID NO: 526 - protein, 43 aa, Artificial Sequence
  Chemically Synthesized
KKRKALEAKKEEEEIQREMVKLRREIIERRRTVKEAWKIEKKR

SEQ ID NO: 527 - protein, 41 aa, Artificial Sequence; identical to SEQ ID NO: 382
  Chemically Synthesized

SEQ ID NO: 528 - protein, 37 aa, Artificial Sequence
  Chemically Synthesized
KKRILESHNNTLVDPCEEHKKKNPDASVKFSEFLKKR

SEQ ID NO: 529 - protein, 34 aa, Artificial Sequence
  Chemically Synthesized
KKRLRMLAVLGVELVFMLAVILGVLLGAHTHKKR

SEQ ID NO: 530 - protein, 37 aa, Artificial Sequence
  Chemically Synthesized
KKRKRGDDDYALPGDGDLVVECEEEGEKGEKRVKKKR

SEQ ID NO: 531 - protein, 40 aa, Artificial Sequence
  Chemically Synthesized
KKRKKRKRGDDDYALPGDGDLVVECEEEGEKGEKRVKKKR

SEQ ID NO: 532 - protein, 43 aa, Artificial Sequence
  Chemically Synthesized
KKRKRGDDDYALPGDGDLVVECEEEGEKGEKRVKKKRRSRKKR

SEQ ID NO: 533 - protein, 46 aa, Artificial Sequence
  Chemically Synthesized
KKRKKRKRGDDDYALPGDGDLVVECEEEGEKGEKRVKKKRRSRKKR

SEQ ID NO: 534 - protein, 37 aa, Artificial Sequence; identical to SEQ ID NO: 530
  Chemically Synthesized

SEQ ID NO: 535 - protein, 40 aa, Artificial Sequence; identical to SEQ ID NO: 531
  Chemically Synthesized

SEQ ID NO: 536 - protein, 43 aa, Artificial Sequence; identical to SEQ ID NO: 532
  Chemically Synthesized

SEQ ID NO: 537 - protein, 46 aa, Artificial Sequence; identical to SEQ ID NO: 533
  Chemically Synthesized

SEQ ID NO: 538 - protein, 28 aa, Artificial Sequence
  Chemically Synthesized
KKRNPESALLNQEKNIEENYAESTIKKR

SEQ ID NO: 539 - protein, 28 aa, Artificial Sequence
  Chemically Synthesized
KKRNPESALSNQEKNIEKNYAESKIKKR

SEQ ID NO: 540 - protein, 45 aa, Artificial Sequence
  Chemically Synthesized
KKRDKGEKKDFCFLTVWGMETELPFGSAQKKPSFFEPISKELKKR

SEQ ID NO: 541 - protein, 28 aa, Artificial Sequence
  Chemically Synthesized
KKRNPESALLNQEKNIEENFAESMIKKR

SEQ ID NO: 542 - protein, 31 aa, Artificial Sequence
  Chemically Synthesized
KKRQDKKNPGSDAQNQKDVEEDSTRSDSKKR

SEQ ID NO: 543 - protein, 28 aa, Artificial Sequence
  Chemically Synthesized
KKRKKKDEGLDEDDYLLLQDNNVKFKKR

SEQ ID NO: 544 - protein, 27 aa, Artificial Sequence
  Chemically Synthesized
KKRKSLERYGSITSAVSDDKGDTTKKR

SEQ ID NO: 545 - protein, 39 aa, Artificial Sequence
  Chemically Synthesized
KKRHYGGESSLAGTQSSIIMRTAAEMLAVYQACGIKKKR

SEQ ID NO: 546 - protein, 36 aa, Artificial Sequence
  Chemically Synthesized
KKRGRNIDDAEEVENELKRVEDELYKIPDHLKVKKR

SEQ ID NO: 547 - protein, 27 aa, Artificial Sequence
  Chemically Synthesized
KKREEEAEQARKREEEREKEEEMAKKR

SEQ ID NO: 548 - protein, 32 aa, Artificial Sequence
  Chemically Synthesized
KKREEEEARKREEERKREEEEAKRREEERKKR

SEQ ID NO: 549 - protein, 44 aa, Artificial Sequence
  Chemically Synthesized
KKRRGRPRKYGPDSGEMSLGLNPGAPSFTVSQPSSGGDGGEKKR

SEQ ID NO: 550 - protein, 34 aa, Artificial Sequence
  Chemically Synthesized
KKRQDFVKDRRWIKREYDEFKVRINGLPEQIKKR

SEQ ID NO: 551 - protein, 44 aa, Artificial Sequence
  Chemically Synthesized
KKRKLETCDETWKREVVQAEEAKGGGEQKSESKKAKKQDKEKKR

SEQ ID NO: 552 - protein, 30 aa, Artificial Sequence
  Chemically Synthesized
KKRKPREWWKEEFCEELTRKKRKKKKKKKR

SEQ ID NO: 553 - protein, 37 aa, Artificial Sequence
  Chemically Synthesized
KKRGLSSISSIDSWFHRDDGASSVHDHNLNPTKRKKR

SEQ ID NO: 554 - protein, 45 aa, Artificial Sequence
  Chemically Synthesized
KKRKKKKKKKRGLSSISSIDSWFHRDDGASSVHDHNLNPTKRKKR

SEQ ID NO: 555 - protein, 27 aa, Artificial Sequence
  Chemically Synthesized
KKRRRATKKPYSRSIVGATLEVIQKKR

SEQ ID NO: 556 - protein, 37 aa, Artificial Sequence
  Chemically Synthesized
KKRVDSVVIGRSSKARRGHREPRKARSSGRLEAEKKR

SEQ ID NO: 557 - protein, 45 aa, Artificial Sequence
  Chemically Synthesized
KKRNKKFTISIKLFKKFYKNKLNENGEYKIESQILQNEKELNKKR

SEQ ID NO: 558 - protein, 39 aa, Artificial Sequence
  Chemically Synthesized
KKRIYLISDRNPSTGETGWYDKDKGRESKKGIWQIFKKR

SEQ ID NO: 559 - protein, 37 aa, Artificial Sequence
  Chemically Synthesized
KKRIAKAKSEAAEYQKLLASRLKEQREKRSESLAKKR

SEQ ID NO: 560 - protein, 27 aa, Artificial Sequence
  Chemically Synthesized
KKRRRTTKKPYSRSIVGATLEVIQKKR

SEQ ID NO: 561 - protein, 45 aa, Artificial Sequence
  Chemically Synthesized
KKRRAKVFKLAKGFKGAHNSLFRTAKQQVLKALRYSYVGRKRKKR

SEQ ID NO: 562 - protein, 37 aa, Artificial Sequence
  Chemically Synthesized
KKRIAKANSDAADYQKLLASRLKEQRDRRSESLAKKR

SEQ ID NO: 563 - protein, 29 aa, Artificial Sequence
  Chemically Synthesized
KKRFLDEMNKKKSCLKMVAQFFFQFKKKR

SEQ ID NO: 564 - protein, 43 aa, Artificial Sequence
  Chemically Synthesized
KKRTNLKKGPQSKLTKKKKERKVDKTRAIINEIERVLKEKKKR

SEQ ID NO: 565 - protein, 46 aa, Artificial Sequence
  Chemically Synthesized
KKRFLDEMNKKKSCLKMVAQFFFQFKKKRKNKKIDKAIKGINKKKR

SEQ ID NO: 566 - protein, 32 aa, Artificial Sequence
  Chemically Synthesized
KKRNKMQDLTNRANKARNEIERIRKEKKKKKR

SEQ ID NO: 567 - protein, 34 aa, Artificial Sequence
  Chemically Synthesized
KKRASVRKICQKCRLTRRRGRIRVICSNPRHKKR

SEQ ID NO: 568 - protein, 29 aa, Artificial Sequence
  Chemically Synthesized
KKRRTLQEWQIQPKKYLLEKHNIKVLKKR

SEQ ID NO: 569 - protein, 45 aa, Artificial Sequence
  Chemically Synthesized
KKRRAKIFKLAKGFKGAHKCLFRTAKQQVLKALRYSYVGRKRKKR

SEQ ID NO: 570 - protein, 46 aa, Artificial Sequence
  Chemically Synthesized
KKRLTAAQVLEHTWILNAKKAPNVSLGETVKARLKQFSVMNKLKKR

SEQ ID NO: 571 - protein, 29 aa, Artificial Sequence
  Chemically Synthesized
KKRLTLKHRIEIVMGIICMIVAGFQEKKR

SEQ ID NO: 572 - protein, 28 aa, Artificial Sequence
  Chemically Synthesized
KKRIDNFKKEALLKANPQIQANPQLKKR

SEQ ID NO: 573 - protein, 46 aa, Artificial Sequence
  Chemically Synthesized
KKRLSAAQVLEHSWIQNAKKAPNVSLGETVKARLKQFSVMNKLKKR

SEQ ID NO: 574 - protein, 28 aa, Artificial Sequence
  Chemically Synthesized
KKRRGRPRKYEANGAPLPSSSVPLVKKR

SEQ ID NO: 575 - protein, 36 aa, Artificial Sequence
  Chemically Synthesized
KKRGYNGKVIALIVALSTVISIMLVLLFLFMMYKKR

SEQ ID NO: 576 - protein, 27 aa, Artificial Sequence
  Chemically Synthesized
KKRDASFVQPDERTAQTFSTKNKEKKR

SEQ ID NO: 577 - protein, 33 aa, Artificial Sequence
  Chemically Synthesized
KKRKLEAEAEVVVVEAAAATSTDEATKSSKKKR

SEQ ID NO: 578 - protein, 46 aa, Artificial Sequence
  Chemically Synthesized
KKRSRATSTDKNKRARVNKRAQKNVEMSGDNNEGEEEEGETKLKKR

SEQ ID NO: 579 - protein, 27 aa, Artificial Sequence
  Chemically Synthesized
KKRVSDESDSDSDSGDRKRRRRSMKKR

SEQ ID NO: 580 - protein, 45 aa, Artificial Sequence
  Chemically Synthesized
KKRKRSKPLRPAPSRVLRSTSEKKNKAHNELLNDGAGVQPAEKKR

SEQ ID NO: 581 - protein, 26 aa, Artificial Sequence
  Chemically Synthesized
KKRKRSSKKDKHRRSKQRDKRHEKKR

SEQ ID NO: 582 - protein, 44 aa, Artificial Sequence
  Chemically Synthesized
KKRSMRDKRPKRKSRRSPDSLEDSNSGSEASLSDVNVEIGAKKR

SEQ ID NO: 583 - protein, 41 aa, Artificial Sequence
  Chemically Synthesized
KKRKSKKNKRHKKHSSRTVEETDESSTGSEDSREKRGSKKR

SEQ ID NO: 584 - protein, 40 aa, Artificial Sequence
  Chemically Synthesized
KKREEQLEKARLAMERKRKLHEKAAAKAVIRVKKEAEKKR

SEQ ID NO: 585 - protein, 34 aa, Artificial Sequence
  Chemically Synthesized
KKRLRMLAVLGVELVFMLAVILGVLLSAHTHKKR

SEQ ID NO: 586 - protein, 44 aa, Artificial Sequence
  Chemically Synthesized
KKRKGSETEGWENLPDDLSCSTASRSSNFRSHFSLEGYARLKKR

SEQ ID NO: 587 - protein, 41 aa, Artificial Sequence
  Chemically Synthesized
KKRVYKDKSRCYECGDEGHLSYECPKNQLGPRERPPPPKKR

SEQ ID NO: 588 - protein, 29 aa, Artificial Sequence
  Chemically Synthesized
KKRMEALNLPKLSQILNSTSVKISPMKKR

SEQ ID NO: 589 - protein, 30 aa, Artificial Sequence
  Chemically Synthesized
KKRSIPRTPEKKMVDVKRVHIQRRGVGKKR

SEQ ID NO: 590 - protein, 26 aa, Artificial Sequence
  Chemically Synthesized
KKRVKTQCVIKSSDKSDHDTLLKKKR

SEQ ID NO: 591 - protein, 27 aa, Artificial Sequence
  Chemically Synthesized
KKRVYRLVKASDVKSKEHVKNKSGKKR

SEQ ID NO: 592 - protein, 27 aa, Artificial Sequence
  Chemically Synthesized
KKRPGVSPGDRSGGKGRPTSRMGNKKR

SEQ ID NO: 593 - protein, 36 aa, Artificial Sequence
  Chemically Synthesized
KKRNTCSVSSQTRKVSLKISKINGVGVRCTPNSKKR

SEQ ID NO: 594 - protein, 37 aa, Artificial Sequence
  Chemically Synthesized
KKRQDKLEMSEIKQFFDRPIMKAAKELNVGLTVLKKR

SEQ ID NO: 595 - protein, 43 aa, Artificial Sequence
  Chemically Synthesized
KKRNLKKKRQDKLEMSEIKQFFDRPIMKAAKELNVGLTVLKKR

SEQ ID NO: 596 - protein, 29 aa, Artificial Sequence
  Chemically Synthesized
KKRKLYDAMKISQSRKRSGVEIIEQRKKR

SEQ ID NO: 597 - protein, 36 aa, Artificial Sequence
  Chemically Synthesized
KKRGYNSQVLALIVALSGVTVILLALLFFFVMYKKR

SEQ ID NO: 598 - protein, 39 aa, Artificial Sequence
  Chemically Synthesized
KKRQPEFRMLGKDHLSDQESVEVRVPDSIKKPIDSSKKR

SEQ ID NO: 599 - protein, 37 aa, Artificial Sequence
  Chemically Synthesized
KKRVAKAKSEAAEYQKLLASRLKEQRDRRSESLAKKR

SEQ ID NO: 600 - protein, 29 aa, Artificial Sequence
  Chemically Synthesized
KKRKEETVLLPSGVQGLGMGLPDMRSKKR

SEQ ID NO: 601 - protein, 39 aa, Artificial Sequence
  Chemically Synthesized
KKRVKKLKSKKLEAEEELNNVQEIDAHDIVMEQKSDKKR

SEQ ID NO: 602 - protein, 38 aa, Artificial Sequence
  Chemically Synthesized
KKRKKTPNGDPQRLGIDTLLPQCLRGAPAAARRKRKKR

SEQ ID NO: 603 - protein, 36 aa, Artificial Sequence
  Chemically Synthesized
KKRRAPPPPSPGLLGQDKVSEKASLSSQADLQKKKR

SEQ ID NO: 604 - protein, 39 aa, Artificial Sequence; identical to SEQ ID NO: 400
  Chemically Synthesized

SEQ ID NO: 605 - protein, 42 aa, Artificial Sequence
  Chemically Synthesized
KKRMRLEEENEGLRQRLIETELAKQVLQTELDRPREHSLKKR

SEQ ID NO: 606 - protein, 33 aa, Artificial Sequence
  Chemically Synthesized
KKRAKMGKLKDKFKTELESTSEILGFDVKTKKR

SEQ ID NO: 607 - protein, 45 aa, Artificial Sequence
  Chemically Synthesized
KKRKKLKSEGTTSEKKAASQQDAVTEGAMPAATGKDQPPSTGKKR

SEQ ID NO: 608 - protein, 33 aa, Artificial Sequence
  Chemically Synthesized
KKRKEEERKKKETDQKKEAAVSVQEESDLEKKR

SEQ ID NO: 609 - protein, 29 aa, Artificial Sequence
  Chemically Synthesized
KKRKKGEKQAPGEEKGRKRRRVKEDKKKR

SEQ ID NO: 610 - protein, 36 aa, Artificial Sequence
  Chemically Synthesized
KKRSFSGFGSPLDRLSAGSVEHRGKQRKAVDHSKKR

SEQ ID NO: 611 - protein, 36 aa, Artificial Sequence
  Chemically Synthesized
KKRSFSGFGSPLDRLSAGSVEHRGKQRRVVDHSKKR

SEQ ID NO: 612 - protein, 27 aa, Artificial Sequence
  Chemically Synthesized
KKRVGDSSALQTIHGKEMSKIARKKKR

SEQ ID NO: 613 - protein, 27 aa, Artificial Sequence
  Chemically Synthesized
KKRVGDSSALQTIHGKEMSKIARKKKR

SEQ ID NO: 614 - protein, 41 aa, Artificial Sequence; identical to SEQ ID NO: 382
  Chemically Synthesized

SEQ ID NO: 615 - protein, 39 aa, Artificial Sequence
  Chemically Synthesized
KKRDKVEASSLPEARAGKRERCSAEDEDCLPPRPKAKKR

SEQ ID NO: 616 - protein, 45 aa, Artificial Sequence
  Chemically Synthesized
KKRRKKSSGERLKEEKPKKSKTAAASKTKGKSKLNTITPVVGKKR

SEQ ID NO: 617 - protein, 39 aa, Artificial Sequence
  Chemically Synthesized
KKRKQKEGEEAATTEKSLGDELLGHTDRSFRDSRKKKKR

SEQ ID NO: 618 - protein, 44 aa, Artificial Sequence
  Chemically Synthesized
KKRQKAERQGTAIGSEEEEAAGESGPRELSTEQSDQPSRKKKKR

SEQ ID NO: 619 - protein, 46 aa, Artificial Sequence
  Chemically Synthesized
KKRRKQRHEEDGEMGVCDEGGRDVTSRPKAVNSGGDKDPRRSSKKR

SEQ ID NO: 620 - protein, 33 aa, Artificial Sequence
  Chemically Synthesized
KKRTKMGKLKDKFKTELESTSEIIGFDVKTKKR

SEQ ID NO: 621 - protein, 45 aa, Artificial Sequence
  Chemically Synthesized
KKREQTASAPATPLVSKHRPSFTRSNTISKPYISNTLPSDAPKKR

SEQ ID NO: 622 - protein, 27 aa, Artificial Sequence
  Chemically Synthesized
KKRKERFGIVTSSAGTGTTEDTEAKKR

SEQ ID NO: 623 - protein, 42 aa, Artificial Sequence
  Chemically Synthesized
KKRPKGYVQTRTGRTSLKNSSETVGQKRKKAEETKGLPPKKR

SEQ ID NO: 624 - protein, 33 aa, Artificial Sequence
  Chemically Synthesized
KKRQRLIDVQDELIRLEPQLKQLQTKYDDLKKR

SEQ ID NO: 625 - protein, 45 aa, Artificial Sequence
  Chemically Synthesized
KKRKMYEDKPLSSESLSESDCGEVQAKKKKSGEERERTTDKAKKR

SEQ ID NO: 626 - protein, 31 aa, Artificial Sequence
  Chemically Synthesized
KKRVKQFKNKPQGGKGPKDKFQKANKFNKKR

SEQ ID NO: 627 - protein, 36 aa, Artificial Sequence
  Chemically Synthesized
KKRQTCEEDLDTQDEEDKDDLTKKERKVRKKDKKKR

SEQ ID NO: 628 - protein, 44 aa, Artificial Sequence
  Chemically Synthesized
KKRQQYCEEVLDVSNKDDGRTWEAEDGGERSQPHPKARAKKKKR

SEQ ID NO: 629 - protein, 46 aa, Artificial Sequence
  Chemically Synthesized
KKRRRRHHEEEEEMGVCDEGGRDVTGGPKAVNSGADTDPWRSSKKR

SEQ ID NO: 630 - protein, 46 aa, Artificial Sequence
  Chemically Synthesized
KKRSSIWQFFSRLFSSSSNATKKPEPPVNLKYNAPTSHVTPSVKKR

SEQ ID NO: 631 - protein, 36 aa, Artificial Sequence
  Chemically Synthesized
KKRRAPPPPSPKLLGQDKVSEKASLSSQADLQKKKR

SEQ ID NO: 632 - protein, 32 aa, Artificial Sequence
  Chemically Synthesized
KKRKALEFVTNPDIAAKKKLKKHKNKSEAKKR

SEQ ID NO: 633 - protein, 39 aa, Artificial Sequence
  Chemically Synthesized
KKRDKVETGGLPESKAGKRERSSAEDEDCLPPRPKLKKR

SEQ ID NO: 634 - protein, 41 aa, Artificial Sequence
  Chemically Synthesized
KKRVIASPQAPASKKLKEELPVIPKGKPKSGRVWKDRSKKR

SEQ ID NO: 635 - protein, 40 aa, Artificial Sequence
  Chemically Synthesized
KKRVEAEREMVRMVRAATLIQAMWKGYLVRSMLRSRKKKR

SEQ ID NO: 636 - protein, 27 aa, Artificial Sequence
  Chemically Synthesized
KKRSLKLTEGKSLVDGNGEKPVMKKKR

SEQ ID NO: 637 - protein, 28 aa, Artificial Sequence
  Chemically Synthesized
KKRRRRPPKGEEGSEEEETENGPKPKKR

SEQ ID NO: 638 - protein, 37 aa, Artificial Sequence
  Chemically Synthesized
KKRGGGGGRRSKKGGEFDEFVNDDTDDDLPVSKKKKR

SEQ ID NO: 639 - protein, 28 aa, Artificial Sequence
  Chemically Synthesized
KKRRREPQTPAQETLESEWPQKAKKKKR

SEQ ID NO: 640 - protein, 33 aa, Artificial Sequence; identical to SEQ ID NO: 608
  Chemically Synthesized

SEQ ID NO: 641 - protein, 36 aa, Artificial Sequence
  Chemically Synthesized
KKRSAGIIEDVGGEVQNMLEKFGADINKALLAKKKR

SEQ ID NO: 642 - protein, 45 aa, Artificial Sequence; identical to SEQ ID NO: 375
  Chemically Synthesized

SEQ ID NO: 643 - protein, 31 aa, Artificial Sequence
  Chemically Synthesized
KKRAATTVLQELKKLPPLPVIEKPKLFFKKR

SEQ ID NO: 644 - protein, 29 aa, Artificial Sequence
  Chemically Synthesized
KKRKKGQEAGHEAGGEDAAEANGAPEKKR

SEQ ID NO: 645 - protein, 45 aa, Artificial Sequence; identical to SEQ ID NO: 375
  Chemically Synthesized

SEQ ID NO: 646 - protein, 34 aa, Artificial Sequence
  Chemically Synthesized
KKRKRYFMQEEMEAKTMEPVAELPVPSATSSKKR

SEQ ID NO: 647 - protein, 37 aa, Artificial Sequence
  Chemically Synthesized
KKRKKSKGTETSQVEHTEPVAQTEPPEGTFLFPTKKR

SEQ ID NO: 648 - protein, 43 aa, Artificial Sequence
  Chemically Synthesized
KKRKRQKEADGTEEVDGIVADSQPQVIVEAQEETILLSPTKKR

SEQ ID NO: 649 - protein, 31 aa, Artificial Sequence
  Chemically Synthesized
KKRHQEDQDPIFQASDSSGYQSDHNKKKKKR

SEQ ID NO: 650 - protein, 45 aa, Artificial Sequence
  Chemically Synthesized
KKRHQEDQDPIFQASDSSGYQSDHNKKKKKRKHSEEANFESPKKR

SEQ ID NO: 651 - protein, 45 aa, Artificial Sequence
  Chemically Synthesized
KKRRTPLLSFLSKVSWKLRLQKRELLKNALFVLAERARDPNAKKR

SEQ ID NO: 652 - protein, 46 aa, Artificial Sequence
  Chemically Synthesized
KKRKKLKSEGTTPEKNAASQQDAVTEGAMPAATGKDQPPSTGKKKR

SEQ ID NO: 653 - protein, 39 aa, Artificial Sequence; identical to SEQ ID NO: 400
  Chemically Synthesized

SEQ ID NO: 654 - protein, 26 aa, Artificial Sequence
  Chemically Synthesized
KKRLRNKRSRSRESSSRPRARKDKKR

SEQ ID NO: 655 - protein, 31 aa, Artificial Sequence
  Chemically Synthesized
KKRREKAIGEGRVVYIRNLSGDMSSRELKKR

SEQ ID NO: 656 - protein, 35 aa, Artificial Sequence
  Chemically Synthesized
KKRRRSPSYSPSPVKKKKKKSSKKHKRHRSFSKKR

SEQ ID NO: 657 - protein, 31 aa, Artificial Sequence; identical to SEQ ID NO: 418
  Chemically Synthesized

SEQ ID NO: 658 - protein, 31 aa, Artificial Sequence
  Chemically Synthesized
KKRGRTPKILIPHPTSTPSKSAEPLKFPKKR

SEQ ID NO: 659 - protein, 46 aa, Artificial Sequence
  Chemically Synthesized
KKRLDGIEEVEREINRGRSCKGSEFTCPEDNKIRELTLEIERLKKR

SEQ ID NO: 660 - protein, 38 aa, Artificial Sequence
  Chemically Synthesized
KKRFGGVQELLSQQKKSGEVAVLKRDGRYIYYLITKKR

SEQ ID NO: 661 - protein, 37 aa, Artificial Sequence
  Chemically Synthesized
KKRLRRMTPFWRGVSLRPIGASCRDDSECITRLCKKR

SEQ ID NO: 662 - protein, 46 aa, Artificial Sequence
  Chemically Synthesized
KKRLDGIEEVEREINRGRLCKGSEFTCPEDNKIRELTLEIERLKKR

SEQ ID NO: 663 - protein, 45 aa, Artificial Sequence
  Chemically Synthesized
KKRKMYEDKPLSSESLSESDCGEVQAKRKKSGEERERTTDKAKKR

SEQ ID NO: 664 - protein, 32 aa, Artificial Sequence
  Chemically Synthesized
KKRKREDAGDDDDKEGAIGVRNKVAGGKMKKR

SEQ ID NO: 665 - protein, 45 aa, Artificial Sequence
  Chemically Synthesized
KKRDRAELQPGGPSEDECSDASVEAAEDCVQTPDIQDDVPKPKKR

SEQ ID NO: 666 - protein, 27 aa, Artificial Sequence
  Chemically Synthesized
KKRKERFGIVTSSAGTGTTEDTEAKKR

SEQ ID NO: 667 - protein, 40 aa, Artificial Sequence
  Chemically Synthesized
KKRVEAEREMVRMVRAATLIQAVWKGYLVRSILRSKKKKR

SEQ ID NO: 668 - protein, 35 aa, Artificial Sequence
  Chemically Synthesized
KKRKLKADDTDNVYYNANRKNSKRLNVEVFIPKKR

SEQ ID NO: 669 - protein, 45 aa, Artificial Sequence; identical to SEQ ID NO: 616
  Chemically Synthesized

SEQ ID NO: 670 - protein, 39 aa, Artificial Sequence
  Chemically Synthesized
KKRKNISQDTFGTTFGRIHMQKQDLSKLQTRKMKGLKKR

SEQ ID NO: 671 - protein, 43 aa, Artificial Sequence
  Chemically Synthesized
KKRVIASPQAPASKKLKEKEELPVIPKGKPKSGRVWKDRSKKR

SEQ ID NO: 672 - protein, 37 aa, Artificial Sequence
  Chemically Synthesized
KKRQRSESHSASERSSSAESERSYKKSKKHKKKSKKR

SEQ ID NO: 673 - protein, 32 aa, Artificial Sequence
  Chemically Synthesized
KKRQLLDSDEEEDDEGRRQAVSGTPRVHRKKR

SEQ ID NO: 674 - protein, 39 aa, Artificial Sequence; identical to SEQ ID NO: 424
  Chemically Synthesized

SEQ ID NO: 675 - protein, 32 aa, Artificial Sequence
  Chemically Synthesized
KKREAAEKEKRARIAKERAEKERLERQQEKKR

SEQ ID NO: 676 - protein, 41 aa, Artificial Sequence
  Chemically Synthesized
KKRGRKPGSVVAAAAAEAKKKAVKESSIRSVHETVLPIKKR

SEQ ID NO: 677 - protein, 46 aa, Artificial Sequence
  Chemically Synthesized
KKRKRCGVCVPCLRKEPCGACYNCVNRSTSHQICKMRKCEQLKKKR

SEQ ID NO: 678 - protein, 46 aa, Artificial Sequence; identical to SEQ ID NO: 677
  Chemically Synthesized

SEQ ID NO: 679 - protein, 31 aa, Artificial Sequence
  Chemically Synthesized
KKRKRSSTRKASDETDSESETDSRESFKKKR

SEQ ID NO: 680 - protein, 34 aa, Artificial Sequence
  Chemically Synthesized
KKRKKKHPSKKERKGTIRDYECAETKQKKKHKKR

SEQ ID NO: 681 - protein, 26 aa, Artificial Sequence
  Chemically Synthesized
KKRRREHGQLWFPEGFIPKEPSKKKR

SEQ ID NO: 682 - protein, 32 aa, Artificial Sequence
  Chemically Synthesized
KKRMAAELYPVSDHATLQKSGAVMLSLPEKKR

SEQ ID NO: 683 - protein, 36 aa, Artificial Sequence
  Chemically Synthesized
KKRRAPAPPPAPTQTLPPTSQISLGSPSSHNLLKKR

SEQ ID NO: 684 - protein, 31 aa, Artificial Sequence
  Chemically Synthesized
KKRKHVKNEEDETNHEKTKQHLKEEKRRKKR

SEQ ID NO: 685 - protein, 46 aa, Artificial Sequence
  Chemically Synthesized
KKRSSLFSPRKSRKNGNAAAESGRETGKHKSLWKTVFSVYKKDKKR

SEQ ID NO: 686 - protein, 46 aa, Artificial Sequence
  Chemically Synthesized
KKRKRCGVCVPCLRKEPCGTCYNCVNRSTSHQICKMRKCEQLKKKR

SEQ ID NO: 687 - protein, 27 aa, Artificial Sequence
  Chemically Synthesized
KKRGLKPSGKRELAHPPSSEPPLPKKR

SEQ ID NO: 688 - protein, 33 aa, Artificial Sequence
  Chemically Synthesized
KKRKRHRSASRKGRHSGSSSRRKRKEDKKHKKR

SEQ ID NO: 689 - protein, 35 aa, Artificial Sequence
  Chemically Synthesized
KKRREERRKILEEEEQKKKQEEAERKIREEEEKKR

SEQ ID NO: 690 - protein, 35 aa, Artificial Sequence; identical to SEQ ID NO: 689
  Chemically Synthesized

SEQ ID NO: 691 - protein, 26 aa, Artificial Sequence
  Chemically Synthesized
KKRRREHGQLWFPDGFIPKEPSKKKR

SEQ ID NO: 692 - protein, 27 aa, Artificial Sequence
  Chemically Synthesized
KKRRRRDEDSDTEGEQQTQPDGEAKKR

SEQ ID NO: 693 - protein, 31 aa, Artificial Sequence
  Chemically Synthesized
KKRRRRDEDSDTEGEQQTQPDGEAKKRRKKR

SEQ ID NO: 694 - protein, 34 aa, Artificial Sequence
  Chemically Synthesized
KKRECAANGVDYERAKLLEISAEDAERWERKKKR

SEQ ID NO: 695 - protein, 39 aa, Artificial Sequence
  Chemically Synthesized
KKRDEERKRELEERRKKEQEEQLRRLREEEREEDEKKKR

SEQ ID NO: 696 - protein, 41 aa, Artificial Sequence
  Chemically Synthesized
KKRSSSRCRSGSDSPARKHSTLAKYRAEVPDRRKKERRKKR

SEQ ID NO: 697 - protein, 26 aa, Artificial Sequence
  Chemically Synthesized
KKRRKRPQKAAGSDDDEEQTPQSKKR

SEQ ID NO: 698 - protein, 30 aa, Artificial Sequence
  Chemically Synthesized
KKRKKGGSSSGEQGEGGDEGEGGEKKKKKR

SEQ ID NO: 699 - protein, 26 aa, Artificial Sequence
  Chemically Synthesized
KKRSYKDLLREEEEIAEQVRKSSKKR

SEQ ID NO: 700 - protein, 45 aa, Artificial Sequence
  Chemically Synthesized
KKRKVEKQIPDATKKKKATVKKECFITQERSEEKPDNESNKNKKR

SEQ ID NO: 701 - protein, 27 aa, Artificial Sequence
  Chemically Synthesized
KKRHDSPDLSPQEQQTTPDLSLQRKKR

SEQ ID NO: 702 - protein, 30 aa, Artificial Sequence
  Chemically Synthesized
KKRKFEKPPDPSVRKRLKLVKEEKLLRKKR

SEQ ID NO: 703 - protein, 27 aa, Artificial Sequence
  Chemically Synthesized
KKRRKRPQKGGDGSDDDEDQAPQPKKR

SEQ ID NO: 704 - protein, 32 aa, Artificial Sequence
  Chemically Synthesized
KKRRKRPQKGGDGSDDDEDQAPQPKKRQPKKR

SEQ ID NO: 705 - protein, 33 aa, Artificial Sequence
  Chemically Synthesized
KKRKKGGGSSGSGGEQGEGGEEGEGGEKKKKKR

SEQ ID NO: 706 - protein, 34 aa, Artificial Sequence
  Chemically Synthesized
KKRPEVLTIHENSRQENYETETVQVKQAKPNKKR

SEQ ID NO: 707 - protein, 39 aa, Artificial Sequence
  Chemically Synthesized
KKRKHKLQETKGKIKKSESVQNTDPTEEADSSVKKKKKR

SEQ ID NO: 708 - protein, 44 aa, Artificial Sequence
  Chemically Synthesized
KKRKNRKKPTILEGKETETPVEKTPEGASGEGKKNKNKKKNKKR

SEQ ID NO: 709 - protein, 39 aa, Artificial Sequence
  Chemically Synthesized
KKRKKNFMMMRHSQNVRTKGKRSFREKQIALRDSLLKKR

SEQ ID NO: 710 - protein, 31 aa, Artificial Sequence
  Chemically Synthesized
KKRRARSRSNSRSKHRHRSRSRSKSREKKKR

SEQ ID NO: 711 - protein, 42 aa, Artificial Sequence
  Chemically Synthesized
KKRRKTCKTSTTDSRSSRLEEDPVGQDIPDESNAQSSPKKKR

SEQ ID NO: 712 - protein, 39 aa, Artificial Sequence
  Chemically Synthesized
KKRDEERRRELEERRKKEQEEQLRRLREEEREEEERKKR

SEQ ID NO: 713 - protein, 26 aa, Artificial Sequence
  Chemically Synthesized
KKRSYKDLLREEEEIAEQVRKSSKKR

SEQ ID NO: 714 - protein, 34 aa, Artificial Sequence
  Chemically Synthesized
KKREREQSETASTAPVEPFTLPKPVEVVVEEKKR

SEQ ID NO: 715 - protein, 31 aa, Artificial Sequence
  Chemically Synthesized
KKRAALSILQELKKLPVLPVVEKPKVHYKKR

SEQ ID NO: 716 - protein, 26 aa, Artificial Sequence
  Chemically Synthesized
KKRRRREGESDTEEEQTQPDGEGKKR

SEQ ID NO: 717 - protein, 30 aa, Artificial Sequence
  Chemically Synthesized
KKRRRREGESDTEEEQTQPDGEGKKRRKKR

SEQ ID NO: 718 - protein, 31 aa, Artificial Sequence
  Chemically Synthesized
KKRRPRSRSRSRSKHRHRSKSRSKSREKKKR

SEQ ID NO: 719 - protein, 34 aa, Artificial Sequence
  Chemically Synthesized
KKRECAANGVDFERAKLLEISAEDAERWERKKKR

SEQ ID NO: 720 - protein, 46 aa, Artificial Sequence
  Chemically Synthesized
KKRKELDDVSEDVETLEMVFESRDLDWEEQTANGDQEAQSNKRKKR

SEQ ID NO: 721 - protein, 30 aa, Artificial Sequence
  Chemically Synthesized
KKRAQRILIFLLEFLLDFCTGEDSVDGKKR

SEQ ID NO: 722 - protein, 41 aa, Artificial Sequence
  Chemically Synthesized
KKRAPKLRATCSSSGLDNLYNAVANIAKASSLRVEVIHKKR

SEQ ID NO: 723 - protein, 41 aa, Artificial Sequence; identical to SEQ ID NO: 722
  Chemically Synthesized

SEQ ID NO: 724 - protein, 45 aa, Artificial Sequence
  Chemically Synthesized
KKRRYFMDIWMKDSSGQEFFIEIKPKKETQPPVKPAHLTTAAKKR

SEQ ID NO: 725 - protein, 35 aa, Artificial Sequence
  Chemically Synthesized
KKREILIRSLQMIKRQAVKSAANQRNPMGGSWKKR

SEQ ID NO: 726 - protein, 37 aa, Artificial Sequence
  Chemically Synthesized
KKRPCKVKRKLFGSENIRPNKKIPLASDVDNELEKKR

SEQ ID NO: 727 - protein, 26 aa, Artificial Sequence
  Chemically Synthesized
KKRMDDTEKRKLQEDRRNEKQDLKKR

SEQ ID NO: 728 - protein, 28 aa, Artificial Sequence
  Chemically Synthesized
KKRYRSPSSDRSLSRDRSSSRDRSYKKR

SEQ ID NO: 729 - protein, 41 aa, Artificial Sequence
  Chemically Synthesized
KKRRPGRGDTSATSDGGTSPKRPLRDSWNLLPQRRAAHKKR

SEQ ID NO: 730 - protein, 26 aa, Artificial Sequence
  Chemically Synthesized
KKRVVGLESCSNVLKTRLMRFALKKR

SEQ ID NO: 731 - protein, 1155 aa, Artificial Sequence
  Chemically Synthesized
MDYKDHDGDYKDHDIDYKDDDDKGGNSKKRSLEDNETEIKVSRDTWNTKNMRSLEPPRSKKRIHGGNIPALVENQKKYFGTYSVMAMLNAQTVLDHIQKVADIEGEQNENNENLWFHPVMSHLYNAKNGYDKQPEKTMFIIERLQSYFPFLKIMAENQREYSNGKYKQNRVEVNSNDIFEVLKRAFGVLKMYRDLTNHYKTYEEKLNDGCEFLTSTEQPLSGMINNYYTVALRNMNERYGYKTEDLAFIQDKRFKFVKDAYGKKKSQVNTGFFLSLQDYNGDTQKKLHLSGVGIALLICLFLDKQYINIFLSRLPIFSSYNAQSEERRIIIRSFGINSIKLPKDRIHSEKSNKSVAMDMLNEVKRCPDELFTTLSAEKQSRFRIISDDHNEVLMKRSSDRFVPLLLQYIDYGKLFDHIRFHVNMGKLRYLLKADKTCIDGQTRVRVIEQPLNGFGRLEEAETMRKQENGTFGNSGIRIRDFENMKRDDANPANYPYIVDTYTHYILENNKVEMFINDKEDSAPLLPVIEDDRYVVKTIPSCRMSTLEIPAMAFHMFLFGSKKTEKLIVDVHNRYKRLFQAMQKEEVTAENIASFGIAESDLPQKILDLISGNAHGKDVDAFIRLTVDDMLTDTERRIKRFKDDRKSIRSADNKMGKRGFKQISTGKLADFLAKDIVLFQPSVNDGENKITGLNYRIMQSAIAVYDSGDDYEAKQQFKLMFEKARLIGKGTTEPHPFLYKVFARSIPANAVEFYERYLIERKFYLTGLSNEIKKGNRVDVPFIRRDQNKWKTPAMKTLGRIYSEDLPVELPRQMFDNEIKSHLKSLPQMEGIDFNNANVTYLIAEYMKRVLDDDFQTFYQWNRNYRYMDMLKGEYDRKGSLQHCFTSVEEREGLWKERASRTERYRKQASNKIRSNRQMRNASSEEIETILDKRLSNSRNEYQKSEKVIRRYRVQDALLFLLAKKTLTELADFDGERFKLKEIMPDAEKGILSEIMPMSFTFEKGGKKYTITSEGMKLKNYGDFFVLASDKRIGNLLELVGSDIVSKEDIMEEFNKYDQCRPEISSIVFNLEKWAFDTYPELSARVDREEKVDFKSILKILLNNKNINKEQSDILRKIRNAFDHNNYPDKGVVEIKALPEIAMSIKKAFGEYAIMK

SEQ ID NO: 732 - protein, 1169 aa, Artificial Sequence
  Chemically Synthesized
MDYKDHDGDYKDHDIDYKDDDDKGGNSKKRSLEDNETEIKVSRDTWNTKNMRSLEPPRSKKRIHGGNIPALVENQKKYFGTYSVMAMLNAQTVLDHIQKVADIEGEQNENNENLWFHPVMSHLYNAKNGYDKQPEKTMFIIERLQSYFPFLKIMAENQREYSNGKYKQNRVEVNSNDIFEVLKRAFGVLKMYRDLTNAYKTYEEKLNDGCEFLTSTEQPLSGMINNYYTVALRNMNERYGYKTEDLAFIQDKRFKFVKDAYGKKKSQVNTGFFLSLQDYNGDTQKKLHLSGVGIALLICLFLDKQYINIFLSRLPIFSSYNAQSEERRIIIRSFGINSIKLPKDRIHSEKSNKSVAMDMLNEVKRCPDELFTTLSAEKQSRFRIISDDHNEVLMKRSSDRFVPLLLQYIDYGKLFDHIRFHVNMGKLRYLLKADKTCIDGQTRVRVIEQPLNGFGRLEEAETMRKQENGTFGNSGIRIRDFENMKRDDANPANYPYIVDTYTHYILENNKVEMFINDKEDSAPLLPVIEDDRYVVKTIPSCRMSTLEIPAMAFHMFLFGSKKTEKLIVDVHNRYKRLFQAMQKEEVTAENIASFGIAESDLPQKILDLISGNAHGKDVDAFIRLTVDDMLTDTERRIKRFKDDRKSIRSADNKMGKRGFKQISTGKLADFLAKDIVLFQPSVNDGENKITGLNYRIMQSAIAVYDSGDDYEAKQQFKLMFEKARLIGKGTTEPHPFLYKVFARSIPANAVEFYERYLIERKFYLTGLSNEIKKGNRVDVPFIRRDQNKWKTPAMKTLGRIYSEDLPVELPRQMFDNEIKSHLKSLPQMEGIDFNNANVTYLIAEYMKRVLDDDFQTFYQWNRNYRYMDMLKGEYDRKGSLQHCFTSVEEREGLWKERASRTERYRKQASNKIRSNRQMRNASSEEIETILDKRLSNSRNEYQKSEKVIRRYRVQDALLFLLAKKTLTELADFDGERFKLKEIMPDAEKGILSEIMPMSFTFEKGGKKYTITSEGMKLKNYGDFFVLASDKRIGNLLELVGSDIVSKEDIMEEFNKYDQCRPEISSIVFNLEKWAFDTYPELSARVDREEKVDFKSILKILLNNKNINKEQSDILRKIRNAFDANNYPDKGVVEIKALPEIAMSIKKAFGEYAIMKSRGGGGSGGGGSTR

SEQ ID NO: 733 - protein, 1061 aa, Artificial Sequence
  Chemically Synthesized
MDYKDHDGDYKDHDIDYKDDDDKGGNSKKRSLEDNETEIKVSRDTWNTKNMRSLEPPRSKKRIHGGNIPALVENQKKYFGTYSVMAMLNAQTVLDHIQKVADIEGEQNENNENLWFHPVMSHLYNAKNGYDKQPEKTMFIIERLQSYFPFLKIMAENQREYSNGKYKQNRVEVNSNDIFEVLKRAFGVLKMYRDLTNAYKTYEEKLNDGCEFLTSTEQPLSGMINNYYTVALRNMNERYGYKTEDLAFIQDKRFKFVKDAYGKKKSQVNTGFFLSLQDYNGDTQKKLHLSGVGIALLICLFLDKQYINIFLSRLPIFSSYNAQSEERRIIIRSFGINSIKLPKDRIHSEKSNKSVAMDMLNEVKRCPDELFTTLSAEKQSRFRIISDDHNEVLMKRSSDRFVPLLLQYIDYGKLFDHIRFHVNMGKLRYLLKADKTCIDGQTRVRVIEQPLNGFGRLEEAETMRKQENGTFGNSGIRIRDFENMKRDDANPANYPYIVDTYTHYILENNKVEMFINDKEDSAPLLPVIEDDRYVVKTIPSCRMSTLEIPAMAFHMFLFGSKKTEKLIVDVHNRYKRLFQAMQKEEVTAENIASFGIAESDLPQKILDLISGNAHGKDVDAFIRLTVDDMLTDTERRIKRFKDDRKSIRSADNKMGKRGFKQISTGKLADFLAKDIVLFQPSVNDGENKITGLNYRIMQSAIAVYDSGDDYEAKQQFKLMFEKARLIGKGTTEPHPFLYKVFARSIPANAVEFYERYLIERKFYLTGLSNEIKKGNRVDVPFIRRDQNKWKTPAMKTLGRIYSEDLPVELPRQMFDNEIKSHLKSLPQMEGIDFNNANVTYLIAEYMKRVLDDDFQTFYQWNRNYRYMDMLKGEYDRKGSLQHCFTSVEEREGLWKERASRTERYRKQASNKIRSNRQMRNASSEEIETILDKRLSNSRNEYQKSEKVIRRYRVQDALLFLLAKKTLTELADFDGERFKLKEIMPDAEKGILSEIMPMSFTFEKGGKKYTITSEGMKLKNYGDFFVLASDKRIGNLLELVGSDIVSKEDRGGGGSGGGGSTR

SEQ ID NO: 734 - DNA, 3267 bp, Artificial Sequence
  Chemically Synthesized
aacatccccgctctggtggaaaaccagaagaagtactttggcacctacagcgtgatggccatgctgaacgctcagaccgtgctggaccacatccagaaggtggccgatattgagggcgagcagaacgagaacaacgagaatctgtggtttcaccccgtgatgagccacctgtacaacgccaagaacggctacgacaagcagcccgagaaaaccatgttcatcatcgagcggctgcagagctacttcccattcctgaagatcatggccgagaaccagagagagtacagcaacggcaagtacaagcagaaccgcgtggaagtgaacagcaacgacatcttcgaggtgctgaagcgcgccttcggcgtgctgaagatgtacagggacctgaccaaccactacaagacctacgaggaaaagctgaacgacggctgcgagttcctgaccagcacagagcaacctctgagcggcatgatcaacaactactacacagtggccctgcggaacatgaacgagagatacggctacaagacagaggacctggccttcatccaggacaagcggttcaagttcgtgaaggacgcctacggcaagaaaaagtcccaagtgaataccggattcttcctgagcctgcaggactacaacggcgacacacagaagaagctgcacctgagcggagtgggaatcgccctgctgatctgcctgttcctggacaagcagtacatcaacatctttctgagcaggctgcccatcttctccagctacaatgcccagagcgaggaacggcggatcatcatcagatccttcggcatcaacagcatcaagctgcccaaggaccggatccacagcgagaagtccaacaagagcgtggccatggatatgctcaacgaagtgaagcggtgccccgacgagctgttcacaacactgtctgccgagaagcagtcccggttcagaatcatcagcgacgaccacaatgaagtgctgatgaagcggagcagcgacagattcgtgcctctgctgctgcagtatatcgattacggcaagctgttcgaccacatcaggttccacgtgaacatgggcaagctgagatacctgctgaaggccgacaagacctgcatcgacggccagaccagagtcagagtgatcgagcagcccctgaacggcttcggcagactggaagaggccgagacaatgcggaagcaagagaacggcaccttcggcaacagcggcatccggatcagagacttcgagaacatgaagcgggacgacgccaatcctgccaactatccctacatcgtggacacctacacacactacatcctggaaaacaacaaggtcgagatgtttatcaacgacaaagaggacagcgccccactgctgcccgtgatcgaggatgatagatacgtggtcaagacaatccccagctgccggatgagcaccctggaaattccagccatggccttccacatgtttctgttcggcagcaagaaaaccgagaagctgatcgtggacgtgcacaaccggtacaagagactgttccaggccatgcagaaagaagaagtgaccgccgagaatatcgccagcttcggaatcgccgagagcgacctgcctcagaagatcctggatctgatcagcggcaatgcccacggcaaggatgtggacgccttcatcagactgaccgtggacgacatgctgaccgacaccgagcggagaatcaagagattcaaggacgaccggaagtccattcggagcgccgacaacaagatgggaaagagaggcttcaagcagatctccacaggcaagctggccgacttcctggccaaggacatcgtgctgtttcagcccagcgtgaacgatggcgagaacaagatcaccggcctgaactaccggatcatgcagagcgccattgccgtgtacgatagcggcgacgattacgaggccaagcagcagttcaagctgatgttcgagaaggcccggctgatcggcaagggcacaacagagcctcatccatttctgtacaaggtgttcgcccgcagcatccccgccaatgccgtcgagttctacgagcgctacctgatcgagcggaagttctacctgaccggcctgtccaacgagatcaagaaaggcaacagagtggatgtgcccttcatccggcgggaccagaacaagtggaaaacacccgccatgaagaccctgggcagaatctacagcgaggatctgcccgtggaactgcccagacagatgttcgacaatgagatcaagtcccacctgaagtccctgccacagatggaaggcatcgacttcaacaatgccaacgtgacctatctgatcgccgagtacatgaagagagtgctggacgacgacttccagaccttctaccagtggaaccgcaactaccggtacatggacatgcttaagggcgagtacgacagaaagggctccctgcagcactgcttcaccagcgtggaagagagagaaggcctctggaaagagcgggcctccagaacagagcggtacagaaagcaggccagcaacaagatccgcagcaaccggcagatgagaaacgccagcagcgaagagatcgagacaatcctggataagcggctgagcaacagccggaacgagtaccagaaaagcgagaaagtgatccggcgctacagagtgcaggatgccctgctgtttctgctggccaaaaagaccctgaccgaactggccgatttcgacggcgagaggttcaaactgaaagaaatcatgcccgacgccgagaagggaatcctgagcgagatcatgcccatgagcttcaccttcgagaaaggcggcaagaagtacaccatcaccagcgagggcatgaagctgaagaactacggcgacttctttgtgctggctagcgacaagaggatcggcaacctgctggaactcgtgggcagcgacatcgtgtccaaagaggatatcatggaagagttcaacaaatacgaccagtgcaggcccgagatcagctccatcgtgttcaacctggaaaagtgggccttcgacacataccccgagctgtctgccagagtggaccgggaagagaaggtggacttcaagagcatcctgaaaatcctgctgaacaacaagaacatcaacaaagagcagagcgacatcctgcggaagatccggaacgccttcgatcacaacaattaccccgacaaaggcgtggtggaaatcaaggccctgcctgagatcgccatgagcatcaagaaggcctttggggagtacgccatcatgaag

SEQ ID NO: 735 - DNA, 2946 bp, Artificial Sequence
  Chemically Synthesized
aacatccccgctctggtggaaaaccagaagaagtactttggcacctacagcgtgatggccatgctgaacgctcagaccgtgctggaccacatccagaaggtggccgatattgagggcgagcagaacgagaacaacgagaatctgtggtttcaccccgtgatgagccacctgtacaacgccaagaacggctacgacaagcagcccgagaaaaccatgttcatcatcgagcggctgcagagctacttcccattcctgaagatcatggccgagaaccagagagagtacagcaacggcaagtacaagcagaaccgcgtggaagtgaacagcaacgacatcttcgaggtgctgaagcgcgccttcggcgtgctgaagatgtacagggacctgaccaaccactacaagacctacgaggaaaagctgaacgacggctgcgagttcctgaccagcacagagcaacctctgagcggcatgatcaacaactactacacagtggccctgcggaacatgaacgagagatacggctacaagacagaggacctggccttcatccaggacaagcggttcaagttcgtgaaggacgcctacggcaagaaaaagtcccaagtgaataccggattcttcctgagcctgcaggactacaacggcgacacacagaagaagctgcacctgagcggagtgggaatcgccctgctgatctgcctgttcctggacaagcagtacatcaacatctttctgagcaggctgcccatcttctccagctacaatgcccagagcgaggaacggcggatcatcatcagatccttcggcatcaacagcatcaagctgcccaaggaccggatccacagcgagaagtccaacaagagcgtggccatggatatgctcaacgaagtgaagcggtgccccgacgagctgttcacaacactgtctgccgagaagcagtcccggttcagaatcatcagcgacgaccacaatgaagtgctgatgaagcggagcagcgacagattcgtgcctctgctgctgcagtatatcgattacggcaagctgttcgaccacatcaggttccacgtgaacatgggcaagctgagatacctgctgaaggccgacaagacctgcatcgacggccagaccagagtcagagtgatcgagcagcccctgaacggcttcggcagactggaagaggccgagacaatgcggaagcaagagaacggcaccttcggcaacagcggcatccggatcagagacttcgagaacatgaagcgggacgacgccaatcctgccaactatccctacatcgtggacacctacacacactacatcctggaaaacaacaaggtcgagatgtttatcaacgacaaagaggacagcgccccactgctgcccgtgatcgaggatgatagatacgtggtcaagacaatccccagctgccggatgagcaccctggaaattccagccatggccttccacatgtttctgttcggcagcaagaaaaccgagaagctgatcgtggacgtgcacaaccggtacaagagactgttccaggccatgcagaaagaagaagtgaccgccgagaatatcgccagcttcggaatcgccgagagcgacctgcctcagaagatcctggatctgatcagcggcaatgcccacggcaaggatgtggacgccttcatcagactgaccgtggacgacatgctgaccgacaccgagcggagaatcaagagattcaaggacgaccggaagtccattcggagcgccgacaacaagatgggaaagagaggcttcaagcagatctccacaggcaagctggccgacttcctggccaaggacatcgtgctgtttcagcccagcgtgaacgatggcgagaacaagatcaccggcctgaactaccggatcatgcagagcgccattgccgtgtacgatagcggcgacgattacgaggccaagcagcagttcaagctgatgttcgagaaggcccggctgatcggcaagggcacaacagagcctcatccatttctgtacaaggtgttcgcccgcagcatccccgccaatgccgtcgagttctacgagcgctacctgatcgagcggaagttctacctgaccggcctgtccaacgagatcaagaaaggcaacagagtggatgtgcccttcatccggcgggaccagaacaagtggaaaacacccgccatgaagaccctgggcagaatctacagcgaggatctgcccgtggaactgcccagacagatgttcgacaatgagatcaagtcccacctgaagtccctgccacagatggaaggcatcgacttcaacaatgccaacgtgacctatctgatcgccgagtacatgaagagagtgctggacgacgacttccagaccttctaccagtggaaccgcaactaccggtacatggacatgcttaagggcgagtacgacagaaagggctccctgcagcactgcttcaccagcgtggaagagagagaaggcctctggaaagagcgggcctccagaacagagcggtacagaaagcaggccagcaacaagatccgcagcaaccggcagatgagaaacgccagcagcgaagagatcgagacaatcctggataagcggctgagcaacagccggaacgagtaccagaaaagcgagaaagtgatccggcgctacagagtgcaggatgccctgctgtttctgctggccaaaaagaccctgaccgaactggccgatttcgacggcgagaggttcaaactgaaagaaatcatgcccgacgccgagaagggaatcctgagcgagatcatgcccatgagcttcaccttcgagaaaggcggcaagaagtacaccatcaccagcgagggcatgaagctgaagaactacggcgacttctttgtgctggctagcgacaagaggatcggcaacctgctggaactcgtgggcagcgacatcgtgtccaaagaggat

SEQ ID NO: 736 - DNA, 3267 bp, Artificial Sequence
  Chemically Synthesized
aacatccccgctctggtggaaaaccagaagaagtactttggcacctacagcgtgatggccatgctgaacgctcagaccgtgctggaccacatccagaaggtggccgatattgagggcgagcagaacgagaacaacgagaatctgtggtttcaccccgtgatgagccacctgtacaacgccaagaacggctacgacaagcagcccgagaaaaccatgttcatcatcgagcggctgcagagctacttcccattcctgaagatcatggccgagaaccagagagagtacagcaacggcaagtacaagcagaaccgcgtggaagtgaacagcaacgacatcttcgaggtgctgaagcgcgccttcggcgtgctgaagatgtacagggacctgaccaacgcatacaagacctacgaggaaaagctgaacgacggctgcgagttcctgaccagcacagagcaacctctgagcggcatgatcaacaactactacacagtggccctgcggaacatgaacgagagatacggctacaagacagaggacctggccttcatccaggacaagcggttcaagttcgtgaaggacgcctacggcaagaaaaagtcccaagtgaataccggattcttcctgagcctgcaggactacaacggcgacacacagaagaagctgcacctgagcggagtgggaatcgccctgctgatctgcctgttcctggacaagcagtacatcaacatctttctgagcaggctgcccatcttctccagctacaatgcccagagcgaggaacggcggatcatcatcagatccttcggcatcaacagcatcaagctgcccaaggaccggatccacagcgagaagtccaacaagagcgtggccatggatatgctcaacgaagtgaagcggtgccccgacgagctgttcacaacactgtctgccgagaagcagtcccggttcagaatcatcagcgacgaccacaatgaagtgctgatgaagcggagcagcgacagattcgtgcctctgctgctgcagtatatcgattacggcaagctgttcgaccacatcaggttccacgtgaacatgggcaagctgagatacctgctgaaggccgacaagacctgcatcgacggccagaccagagtcagagtgatcgagcagcccctgaacggcttcggcagactggaagaggccgagacaatgcggaagcaagagaacggcaccttcggcaacagcggcatccggatcagagacttcgagaacatgaagcgggacgacgccaatcctgccaactatccctacatcgtggacacctacacacactacatcctggaaaacaacaaggtcgagatgtttatcaacgacaaagaggacagcgccccactgctgcccgtgatcgaggatgatagatacgtggtcaagacaatccccagctgccggatgagcaccctggaaattccagccatggccttccacatgtttctgttcggcagcaagaaaaccgagaagctgatcgtggacgtgcacaaccggtacaagagactgttccaggccatgcagaaagaagaagtgaccgccgagaatatcgccagcttcggaatcgccgagagcgacctgcctcagaagatcctggatctgatcagcggcaatgcccacggcaaggatgtggacgccttcatcagactgaccgtggacgacatgctgaccgacaccgagcggagaatcaagagattcaaggacgaccggaagtccattcggagcgccgacaacaagatgggaaagagaggcttcaagcagatctccacaggcaagctggccgacttcctggccaaggacatcgtgctgtttcagcccagcgtgaacgatggcgagaacaagatcaccggcctgaactaccggatcatgcagagcgccattgccgtgtacgatagcggcgacgattacgaggccaagcagcagttcaagctgatgttcgagaaggcccggctgatcggcaagggcacaacagagcctcatccatttctgtacaaggtgttcgcccgcagcatccccgccaatgccgtcgagttctacgagcgctacctgatcgagcggaagttctacctgaccggcctgtccaacgagatcaagaaaggcaacagagtggatgtgcccttcatccggcgggaccagaacaagtggaaaacacccgccatgaagaccctgggcagaatctacagcgaggatctgcccgtggaactgcccagacagatgttcgacaatgagatcaagtcccacctgaagtccctgccacagatggaaggcatcgacttcaacaatgccaacgtgacctatctgatcgccgagtacatgaagagagtgctggacgacgacttccagaccttctaccagtggaaccgcaactaccggtacatggacatgcttaagggcgagtacgacagaaagggctccctgcagcactgcttcaccagcgtggaagagagagaaggcctctggaaagagcgggcctccagaacagagcggtacagaaagcaggccagcaacaagatccgcagcaaccggcagatgagaaacgccagcagcgaagagatcgagacaatcctggataagcggctgagcaacagccggaacgagtaccagaaaagcgagaaagtgatccggcgctacagagtgcaggatgccctgctgtttctgctggccaaaaagaccctgaccgaactggccgatttcgacggcgagaggttcaaactgaaagaaatcatgcccgacgccgagaagggaatcctgagcgagatcatgcccatgagcttcaccttcgagaaaggcggcaagaagtacaccatcaccagcgagggcatgaagctgaagaactacggcgacttctttgtgctggctagcgacaagaggatcggcaacctgctggaactcgtgggcagcgacatcgtgtccaaagaggatatcatggaagagttcaacaaatacgaccagtgcaggcccgagatcagctccatcgtgttcaacctggaaaagtgggccttcgacacataccccgagctgtctgccagagtggaccgggaagagaaggtggacttcaagagcatcctgaaaatcctgctgaacaacaagaacatcaacaaagagcagagcgacatcctgcggaagatccggaacgccttcgatgcaaacaattaccccgacaaaggcgtggtggaaatcaaggccctgcctgagatcgccatgagcatcaagaaggcctttggggagtacgccatcatgaag

SEQ ID NO: 737 - DNA, 3867 bp, Artificial Sequence
  Chemically Synthesized
atggactacaaagaccatgacggtgattataaagatcatgacatcgattacaaggatgacgatgacaagggcggaaactcaaagaaaaggtcactggaggacaacgaaacggaaatcaaagtctccagagacacctggaacactaagaacatgcggtccctggaaccgccacgaagcaagaaacggatacatggaggcaacatccccgctctggtggaaaaccagaagaagtactttggcacctacagcgtgatggccatgctgaacgctcagaccgtgctggaccacatccagaaggtggccgatattgagggcgagcagaacgagaacaacgagaatctgtggtttcaccccgtgatgagccacctgtacaacgccaagaacggctacgacaagcagcccgagaaaaccatgttcatcatcgagcggctgcagagctacttcccattcctgaagatcatggccgagaaccagagagagtacagcaacggcaagtacaagcagaaccgcgtggaagtgaacagcaacgacatcttcgaggtgctgaagcgcgccttcggcgtgctgaagatgtacagggacctgaccaacgcatacaagacctacgaggaaaagctgaacgacggctgcgagttcctgaccagcacagagcaacctctgagcggcatgatcaacaactactacacagtggccctgcggaacatgaacgagagatacggctacaagacagaggacctggccttcatccaggacaagcggttcaagttcgtgaaggacgcctacggcaagaaaaagtcccaagtgaataccggattcttcctgagcctgcaggactacaacggcgacacacagaagaagctgcacctgagcggagtgggaatcgccctgctgatctgcctgttcctggacaagcagtacatcaacatctttctgagcaggctgcccatcttctccagctacaatgcccagagcgaggaacggcggatcatcatcagatccttcggcatcaacagcatcaagctgcccaaggaccggatccacagcgagaagtccaacaagagcgtggccatggatatgctcaacgaagtgaagcggtgccccgacgagctgttcacaacactgtctgccgagaagcagtcccggttcagaatcatcagcgacgaccacaatgaagtgctgatgaagcggagcagcgacagattcgtgcctctgctgctgcagtatatcgattacggcaagctgttcgaccacatcaggttccacgtgaacatgggcaagctgagatacctgctgaaggccgacaagacctgcatcgacggccagaccagagtcagagtgatcgagcagcccctgaacggcttcggcagactggaagaggccgagacaatgcggaagcaagagaacggcaccttcggcaacagcggcatccggatcagagacttcgagaacatgaagcgggacgacgccaatcctgccaactatccctacatcgtggacacctacacacactacatcctggaaaacaacaaggtcgagatgtttatcaacgacaaagaggacagcgccccactgctgcccgtgatcgaggatgatagatacgtggtcaagacaatccccagctgccggatgagcaccctggaaattccagccatggccttccacatgtttctgttcggcagcaagaaaaccgagaagctgatcgtggacgtgcacaaccggtacaagagactgttccaggccatgcagaaagaagaagtgaccgccgagaatatcgccagcttcggaatcgccgagagcgacctgcctcagaagatcctggatctgatcagcggcaatgcccacggcaaggatgtggacgccttcatcagactgaccgtggacgacatgctgaccgacaccgagcggagaatcaagagattcaaggacgaccggaagtccattcggagcgccgacaacaagatgggaaagagaggcttcaagcagatctccacaggcaagctggccgacttcctggccaaggacatcgtgctgtttcagcccagcgtgaacgatggcgagaacaagatcaccggcctgaactaccggatcatgcagagcgccattgccgtgtacgatagcggcgacgattacgaggccaagcagcagttcaagctgatgttcgagaaggcccggctgatcggcaagggcacaacagagcctcatccatttctgtacaaggtgttcgcccgcagcatccccgccaatgccgtcgagttctacgagcgctacctgatcgagcggaagttctacctgaccggcctgtccaacgagatcaagaaaggcaacagagtggatgtgcccttcatccggcgggaccagaacaagtggaaaacacccgccatgaagaccctgggcagaatctacagcgaggatctgcccgtggaactgcccagacagatgttcgacaatgagatcaagtcccacctgaagtccctgccacagatggaaggcatcgacttcaacaatgccaacgtgacctatctgatcgccgagtacatgaagagagtgctggacgacgacttccagaccttctaccagtggaaccgcaactaccggtacatggacatgcttaagggcgagtacgacagaaagggctccctgcagcactgcttcaccagcgtggaagagagagaaggcctctggaaagagcgggcctccagaacagagcggtacagaaagcaggccagcaacaagatccgcagcaaccggcagatgagaaacgccagcagcgaagagatcgagacaatcctggataagcggctgagcaacagccggaacgagtaccagaaaagcgagaaagtgatccggcgctacagagtgcaggatgccctgctgtttctgctggccaaaaagaccctgaccgaactggccgatttcgacggcgagaggttcaaactgaaagaaatcatgcccgacgccgagaagggaatcctgagcgagatcatgcccatgagcttcaccttcgagaaaggcggcaagaagtacaccatcaccagcgagggcatgaagctgaagaactacggcgacttctttgtgctggctagcgacaagaggatcggcaacctgctggaactcgtgggcagcgacatcgtgtccaaagaggatcgaggcggtggaggtagtggagggggaggatcaacgcgttctgtggtaccgcccaatcgctcgcagaccggctggccccggggggtcactcagttcggcaacaagtacatccagcagacgaagcccctcaccctggagcgcaccatcaacctgtaccctcttaccaattatacttttggtacaaaagagcccctctacgagaaggacagctctgttgcagccagatttcagcgcatgagggaagaatttgataaaattggaatgaggaggactgtagaaggggttctgattgtacatgagcaccggctaccccatgtgttactgctgcagctgggaacaactttcttcaaactacctggtggtgaacttaacccaggagaagatgaagttgaaggactaaaacgcttaatgacagagatactgggtcgtcaggatggagttttgcaagactgggtcattgacgattgcattggtaactggtggagaccaaattttgaacctcctcagtatccatatattcctgcacatattacaaagcctaaggaacataagaagttgtttctggttcagcttcaagaaaaagccttgtttgcagtccctaaaaattacaagctggtagctgcaccattgtttgaattgtatgacaatgcaccaggatatggacccatcatttctagtctccctcagctgttgagcaggttcaattttatttacaactagtaa

SEQ ID NO: 738 - DNA, 390 bp, Artificial Sequence
  Chemically Synthesized
aaggaatcccgggccaagaaattccagcggcagcatatggactcagacagttcccccagcagcagctccacctactgtaaccaaatgatgaggcgccggaatatgacacaggggcggtgcaaaccagtgaacacctttgtgcacgagcccctggtagatgtccagaatgtctgtttccaggaaaaggtcacctgcaagaacgggcagggcaactgctacaagagcaactccagcatgcacatcacagactgccgcctgacaaacggctccaggtaccccaactgtgcataccggaccagcccgaaggagagacacatcattgtggcctgtgaagggagcccatatgtgccagtccactttgatgcttctgtggaggactctacctagtaa

SEQ ID NO: 739 - DNA, 408 bp, Artificial Sequence
  Chemically Synthesized
aaacctccacaatttacctgggcgcagtggtttgaaacgcaacacataaacatgacatcccaacaatgcacaaatgccatgcaagtcataaataattatcaaagacgatgtaaaaaccagaacacgtttctcctcaccacgtttgccaatgtggtgaatgtatgtggcaatcctaatatgacttgcccttccaacaagaccaggaaaaactgtcaccactccggcagtcaggtgccgcttatccattgcaaccttactacgccgagtccccaaaatatctctaattgtcggtacgcccagacgccagccaatatgttttatattgtagcatgcgataaccgagaccaacgacgagatccaccccagtacccagtcgtacctgtacatctggaccgcataatttagtaa

SEQ ID NO: 740 - DNA, 405 bp, Artificial Sequence
  Chemically Synthesized
cgacctccgcaatttaccagagcgcaatggtttgctatccagcacatctctctgaacccgccacggtgtaccatagctatgcgggccataaataactatcggtggcggtgcaagaaccagaatacttttctgagaacaacttttgctaacgttgtcaatgtttgtggaaatcaatcaattagatgcccacataatcgcacattgaataattgtcaccgaagtaggttccgagtccccttgcttcactgcgatctgatcaatcctggtgcccaaaatattagtaactgcacgtatgctgaccgaccgggtcggaggttttatgtagtcgcatgtgacaacagagatccaagagattctccaaggtatccagttgtacccgtccacttggacaccacgatatagtaa

SEQ ID NO: 741 - DNA, 363 bp, Artificial Sequence
  Chemically Synthesized
caggatggtatgtatcaacggttcctgcgacagcacgtgcacccggaagagacaggagggtcagaccgatactgcaatctgatgatgcaacgcaggaagatgaccctctaccactgtaagagatttaacactttcatccatgaagacatctggaatatacggagtatatgttctacaactaacatacaatgcaagaatgggaagatgaattgtcacgaaggcgttgtaaaggtgacagactgcagagatacaggtagctcacgagcgcctaactgtcgctatcgcgctatcgcgtcaacaaggagggtggtcattgcttgtgagggtaatccacaagtgcccgtccacttcgatggatagtaa

SEQ ID NO: 742 - DNA, 375 bp, Artificial Sequence
  Chemically Synthesized
caagacaattcacggtacacccacttccttacacaacactacgatgccaagccccaaggccgcgacgaccgctattgtgaaagtattatgaggcggagaggacttacatccccatgtaaagatataaataccttcattcacggtaataaacgaagcataaaagcaatttgtgagaacaaaaacggcaatcctcatcgagaaaatctgcgcatatctaagtcatcctttcaggtgaccacctgcaagctccatggcggctcaccctggcctccttgccaataccgagcaacggctggatttcggaatgttgtagtagcttgtgagaatgggctgccggtacatctggatcaatccatcttcagacgcccgtagtaa

SEQ ID NO: 743 - DNA, 387 bp, Artificial Sequence
  Chemically Synthesized
tggccgaaacgccttacgaaagcacattggttcgagatacaacacatccagccaagcccattgcaatgcaaccgggcgatgtcaggaattaacaactatacacagcattgcaagcaccagaatacatttttgcacgactccttccaaaatgtcgctgcagtttgtgatcttctctccatcgtgtgcaagaaccgccgacataactgtcaccaatctagcaagccggtcaatatgaccgactgtcgcctgactagcggcaaatacccacagtgtcgatactctgccgcagcccaatacaagttctttattgtcgcgtgtgacccaccgcagaaatccgacccgccttacaagttggtgccagtccatttggactccatactctagtaa

SEQ ID NO: 744 - DNA, 390 bp, Artificial Sequence
  Chemically Synthesized
aagcctaaaggtatgaccagtagccagtggttcaaaatccaacacatgcaaccgtccccacaagcgtgtaattcagcgatgaagaacatcaataagcatacaaagaggtgcaaggacctcaacaccttcttgcatgagccctttagtagtgtagccgctacttgtcaaactcccaaaatagcatgtaaaaacggcgacaagaattgtcatcagagtcatggcgccgtatctctgactatgtgtaaactgacaagcgggaaacatccgaactgtagatacaaggaaaaacggcagaataaaagctatgttgtagcgtgcaagcctcctcaaaagaaggactctcagcaatttcacctggttcctgtccatttggacagagttctctagtaa

SEQ ID NO: 745 - DNA, 387 bp, Artificial Sequence
  Chemically Synthesized
aaacccaaggatatgacttcctcacagtggttcaaaacacagcatgttcagccatctccgcaagcctgcaatagtgctatgtctataatcaataagtacactgaaaggtgtaaagacttgaacacgttcttgcacgaacctttcagcagtgtagcgataacgtgccaaactcctaatatcgcgtgtaaaaacagttgtaaaaattgtcatcaatctcacggtccaatgtcattgactatgggtgagttgacctccgggaagtaccccaactgtaggtacaaggaaaaacatctcaatacaccctatatagtcgcctgcgatccgcctcagcaaggtgatccaggctatccccttgttcccgtccacttggacaaggtcgtctagtaa

SEQ ID NO: 746 - DNA, 819 bp, Artificial Sequence
  Chemically Synthesized
aaagagagtagggcgaagaagtttcaacgccaacatatggattctgattcctccccatctagttcatctacgtactgcaatcaaatgatgaggcgccgcaatatgacccaaggcagatgtaagccggttaatacattcgttcatgagccccttgttgatgtacaaaatgtttgctttcaagagaaggtcacctgtaaaaacggccagggaaattgctacaaatccaattcctcaatgcacattacggattgccgactcacgaatgggtctcggtatcccaattgcgcctacaggacctctcctaaagagcgacacattattgtggcatgcgaaggttctccgtacgttcctgtccacttcgacgcttccgtagaagatagcactggaggaggaggttctggcgggggtggaagcggtggaggcgggagcaaagaatcaagggccaaaaaatttcagagacaacacatggactctgactcttctccgagttcctcttcaacatactgcaaccagatgatgcgaagacggaacatgacgcagggaagatgcaagccagtcaatacttttgttcatgaaccgctcgtagacgttcaaaacgtgtgcttccaagagaaagtcacatgcaaaaatggtcaagggaactgttacaaatctaattccagcatgcatataactgattgcaggctgacgaatggatctcgataccctaactgtgcataccgaacttcaccgaaagaaagacatattattgttgcctgcgaaggctccccatacgtacccgtacacttcgacgcctcagtggaagactctacctaatag

SEQ ID NO: 747 - DNA, 378 bp, Artificial Sequence
  Chemically Synthesized
aaggaaactgccgccgccaagtttgagagacaacacatggatagtagcacgtctgccgcgagttcttccaattactgtaatcaaatgatgaagagccgaaacttgactaaggatagatgtaaacccgtaaatacattcgttcacgaatcactggcggatgtacaagcggtttgtagccaaaagaatgtagcatgtaagaacggtcagacaaattgctaccagagctatagtacaatgagtatcaccgattgtcgagagacaggctctagtaaatatccaaattgcgcttacaagacaacgcaggcaaacaagcacataattgtcgcgtgcgagggcaatccctatgtgccagtgcatttcgacgcctctgtgtagtaa

SEQ ID NO: 748 - DNA, 741 bp, Artificial Sequence
  Chemically Synthesized
ctggccctccaggctaagcagtacggggatttcgaccgctatgttctggccctgtcttggcagacgggattttgccagagtcagcatgataggaaccggaatgaaagagatgaatgtagacttcaaactgagacaacgaacaaagctgactttctcacagtccacggactttggcccggactgcccaaatcagtcgccgcaagaggagttgatgagaggaggtggatgagattcggatgcgccacgcgcccaataccgaatctgcctgaggcccgcgcatctcgaatgtgtagttcacccgagaccgggctttcattggagaccgctgctaagttgtctgaagtcatgccaggcgcagggggacggtcttgtctcgaacggtatgagtacgcgaagcatggcgcgtgcttcggttttgacccagatgcatacttcgggaccatggtgcgccttaatcaggagataaaagagtcagaggcaggcaagtttctggcagataattacggcaagacggtttccaggcgagattttgacgcggcgtttgcgaaatcatggggtaaagaaaacgtgaaagcggtcaagctcacatgccaggggaacccggcataccttacggagattcaaatctccataaaagcagatgcgatcaacgccccgttgagcgccaactcctttctgcctcagccccatcctggaaattgtggtaagacatttgtaatcgacaaagcaggctactaatag

SEQ ID NO: 749 - DNA, 390 bp, Artificial Sequence
  Chemically Synthesized
ggtgagtcacaagctgagaaatttcaacggcagcacatggactctgggtcaagcccgtcttcttccagcacgtattgtaatcagatgatgaaactgcgaaacatgacccagggttggtgcaaaagtgttaatacattcgtccacgaaccattggttgatgttcaaaatgtctgttttcaagagaaagtgacttgcaagaacggccagacaaactgttttaaaagtaatagtaagatgcacatcactgagtgtcgccttaccaacggatcaaaatacccgaactgtgcgtatcagacgagtcccaaggagaggcacataatagtggcgtgcgaaggctccccgtatgtacctgtgcatttcgacgattcagtcgaagacagcacatagtaa

SEQ ID NO: 750 - DNA, 390 bp, Artificial Sequence
  Chemically Synthesized
aaggaaagccgggccaagaaattccagcggcagcatatggactcagacagttcccccagcagcagctccacctactgtaaccaaatgatgaggcgccggaatatgacacagggggactgcaaaccagtgaacacctttgtgcacgagcccctggtagatgtccagaatgtctgtttccaggaaaaggtcacctgcaaggacgggcagggcaactgctacaagagcaactccagcatgcacatcacagactgccgcctgacagccgactccgactaccccaactgtgcataccggaccagcccgaaggagagacacatcattgtggcctgtgaagggagcccatatgtgccagtccactttgatgcttctgtggaggactctacctagtaa

SEQ ID NO: 751 - DNA, 378 bp, Artificial Sequence; identical to SEQ ID NO: 747
  Chemically Synthesized

SEQ ID NO: 752 - DNA, 318 bp, Artificial Sequence
  Chemically Synthesized
gcttgtgactatacttgtggtagcaactgttactccagctctgatgtatctacggctcaggcagcgggctatcaattgcatgaggatggggagaccgtgggatctaactcctatccgcataagtataataattacgagggtttcgacttcagcgtttctagcccatattatgaatggccgatcttgtcctcaggagatgtgtatagcggaggctcaccgggagcagacagggttgtgtttaatgagaacaaccagcttgcaggtgtaataacacatacgggtgcaagtggaaataacttcgtagagtgcacttagtaa

SEQ ID NO: 753 - DNA, 318 bp, Artificial Sequence
  Chemically Synthesized
gcttgtgactatacgtgtgggtctaattgctattcatcaagtgatgtctctacggcgcaggcagctgggtataagttgcatgaagatggagaaaccgtcgggtctaacagttacccacacaaatactataaatcaaagggtttcgttttctcagtcagctctccttattacgaatggcctatccttagttctggggatgtctactccggtggatctcctggggcagaccgggtagtatttaatgaaaacaaccaactcgcgggggtgattacgcacactggcgccagtgggaataatttcgtggaatgtacgtagtaa

SEQ ID NO: 754 - DNA, 318 bp, Artificial Sequence
  Chemically Synthesized
gcttgcgactatacctgtggctcaaactgctattcatcctccgatgtcagcacggcacaagcggcgggctataaacttcacgaagacggcgaaacagttgggagtaacagttaccctcataaatactatcattataagggatttcatttcagtgtaacttctccgtattatgaatggcctattctgtccagcggggacgtgtattctggagggtcacctggtgcggatagagtcgtattcaatgaaaataatcagcttgcgggcgttatcactcacacaggtgccagtggcaataacttcgtggagtgcacatagtaa

SEQ ID NO: 755 - DNA, 318 bp, Artificial Sequence
  Chemically Synthesized
gcttgtgactatacttgtggtagcaactgttactccagctctgatgtatctacggctcaggcagcgggctataagttgcatgaggatggggagaccgtgggatctaactcctatccgcatgagttcaggaattggaacggtttcgacttcagcgtttctagcccatattatgaatacccgatcttgtcctcaggagatgtgtatagcggaggctcaccgggagcagacagggttgtgtttaatgagaacaaccagcttgcaggtgtaataacacatacgggtgcaagtggaaataacttcgtagagtgcacttagtaa

SEQ ID NO: 756 - DNA, 456 bp, Artificial Sequence
  Chemically Synthesized
gccgtgacgtggacgtgcctgaacgatcaaaagaatccaaagactaacaaatacgagactaaacgactcctgtataaccaaaacaaggctgaaagcaactcccatcacgcgcctctttccgacggaaaaactggaagctcctacccgcattggtttactaacggttacgatggggatggaaaacttcctaagggtcggacgcctattaagttcggaaaaagcgactgcgaccgaccgccaaagcattccaaggacggcaacggtaagacagaccactatctccttgagttccccactttccctgatgggcacgattataaatttgattctaagaaaccgaaggagaatccaggcccggcacgagtaatctacacctatccaaacaaggtattctgtggcataatcgctcatactaaagaaaaccaaggcgaactcaagctctgctcccattagtaa

SEQ ID NO: 757 - DNA, 336 bp, Artificial Sequence
  Chemically Synthesized
gcctgtgactatacctgcgggtctaattgctattcctcttctgacgtgtctacagcccaagcagcaggttacaaactgcacgaggacggcgagactgtgggaagtaatagctatccccataagtacaataactacgaaggcttcgatttctctgtttcttcaccttattatgagtggcccatactgagttctggcgatgtctacaaatttgatagtaagaagcctaaggaaaatccgggtgcggaccgggtggttttcaacgagaacaaccagcttgcaggcgtaataacccacaccggagcaagcggaaacaactttgtcgagtgcacgtagtaa

SEQ ID NO: 758 - DNA, 336 bp, Artificial Sequence
  Chemically Synthesized
gcacaagtcataaatacctttgatggcgtggcggactatcttcagacataccacaaactcccggataattatattacaaagtccgaggcacaagcgctcggctgggtagcgtctaaaggaaatctggccgacgttgcccctggaaagagcattggtggtgacatctttagtaatagggagggtaagttgccagggaagagtgggagaacttggcgagaggcagatataaattacacctccggcttcagaaacagcgatcgaatcctgtatagttccgactggttgatatataaaacgacagaccattaccaaacttttacaaagattaggtagtaa

SEQ ID NO: 759 - DNA, 469 bp, Artificial Sequence
  Chemically Synthesized
gctcaggtgataaataccttcgatggtgtagctgactatttgcaaacctaccataaactgccagataactatataaccaagagtgaagctcaagcccttggatgggtcgcttctaagggcaatctcgctgacgtggcccctggaaagagcatcggtggcgatatattttcaaaccgagaaggtaagtatcaaggttacaagacaggtttaaggagaccaatagaaactgggcttgtcgagacagagaagactcttgcgtttctgataggcacctattggtcttactgacatccactttgcctttctctccacaggtaaattgccaggcaagtctgggcgaacatggcgggaggcagacattaactatacgtctgggtttcgcaatagcgatagaatcttgtattctagcgattggctgatctataaaaccacggatcattatcaaacatttactaagattcggtagtaa

SEQ ID NO: 760 - DNA, 609 bp, Artificial Sequence
  Chemically Synthesized
aaggaaacggcagcagccaagtttgagagacaacacatggatagtagcaccagtgccgctggtgggagcggcggcaaggagactgcagctgctaaattcgagcgacaacacatggactcctccacaagcgcagcaggcggctctggtggcaaagagaccgccgctgcaaagtttgagaggcaacatatggactcaagtacctctgcagctggtggcagtggtggcggatctggagctaccaactttagtttgttgaagcaagcgggcgacgttgaggagaatcctgggcctagctcaagtaattactgtaaccagatgatgaagagccgaaacttgaccaaggacaggtgtaagcctgtaaacaccttcgtccatgagagtctggcagacgtacaggcagtttgctcacaaaagaacgtggcatgtaaaaacggccaaaccaactgttatcagagttatagtacgatgagcatcactgattgtagggaaactggttcaagtaaataccctaactgcgcctacaagacaacacaggctaataagcatattattgtcgcctgtgaaggtaatccatatgttccggtccactttgacgcttccgtgtaatag

SEQ ID NO: 761 - DNA, 621 bp, Artificial Sequence
  Chemically Synthesized
gcgaaagacttcgacttcttttactttgtccaacagtggcccggcagttattgtgacacgaaacaatcttgttgctacccaacaacaggaaagcccgccgcggattttggcattcacggcttgtggccgaataataatgatggtacatacccaagcaactgcgatcctaacagcccatatgaccaaagtcaaatctcagacctcatctcctcaatgcaacagaactggccaactctcgcttgcccgagtggatcaggtagcaccttctggtcacacgaatgggagaagcatggaacttgcgcggagtcagtgctcacaaaccaacatgcttatttcaagaaggcactcgatttgaaaaaccaaatcgacttgttgtctatcctccagggcgcagacatacacccagacggcgaaagttacgatctcgtgaatataaggaacgctataaaatccgcgattgggtacactccctggattcaatgcaatgtcgatcaatccgggaatagtcagctgtaccaagtttatatctgcgtcgatggaagcggttcatctcttatagaatgcccgatatttcccggcggcaaatgtggcacaagtattgaatttcctacattttagtaa

SEQ ID NO: 762 - DNA, 657 bp, Artificial Sequence
  Chemically Synthesized
gacaaaaggcttagggataaccatgagtggaagaagttgataatggttcagcactggccggaaacagtttgcgagaaaattcagaacgactgtcgggacccacccgattattggaccatacatggactttggccagataagtccgagggctgtaaccgcagctggcccttcaaccttgaggagatcaaagaccttcttccggagatgcgggcgtactggcctgatgtcattcactcattcccaaacagaagtcggttctggaagcatgagtgggaaaagcatggtacttgtgcagcacaagtagacgcattgaactcacagaagaagtattttggccggtcacttgaactgtatcgagaactggatctcaatagtgtattgctcaagctgggaataaagccctctatcaattattatcaagtagctgatttcaaagacgctcttgcgagggtttacggggtgattcccaaaatacaatgcctgcccccgagtcaggatgaagaggtgcagacgattggtcagattgaactttgcctgacaaaacaagaccagcaactgcagaactgtactgaaccgggtgagcaaccgtccccgaaacaagaagtgtggctcgctaacggagcagcagagagccggggtctccgcgtctgtgaagac

SEQ ID NO: 763 - DNA, 318 bp, Artificial Sequence
  Chemically Synthesized
caggactggctgaccttccagaagaagcacatcaccaacaccagagatgtggactgcgacaacatcatgagcaccaacctgttccactgcaaggacaagaacaccttcatctacagcagacccgagcccgtgaaggccatctgcaagggcatcatcgccagcaagaacgtgctgaccaccagcgagttctacctgagcgactgcaacgtgaccagcagaccctgcaagtacaagctgaagaagagcaccaacaagttctgcgtgacctgcgagaaccaggcccccgtgcacttcgtgggcgtgggcagctgctagtaa

SEQ ID NO: 764 - DNA, 687 bp, Artificial Sequence
  Chemically Synthesized
gagaacattacccagtggaatctgcaggacaacggcacagagggaatccagagggcgatgttccagcggggagtcaaccggagcctgcacgggatttggccggaaaagatatgcacaggtgtcccctcccacctggctacagacacagagctgaaagccatacacggtatgatggatgcaagtgaaaagacgaactacacgtgttgtagactgcagcgccatgagtggaataagcatggctggtgcaattggtacaatatcgagccgtggattcttctcatgaacaagacccaggcgaatctcactgaaggacaaccacttagggagtgcgcggttacatgtcggtatgacagagactcagatctcaatgttgttacccaggcgcgagatagtcctacaccattgacagggtgcaagaaaggtaaaaattttagctttgcaggtatcctcgtccaaggcccctgtaactttgaaatagcggttagcgacgttctcttcaaggaacatgacagaactagcgttatacaggacaccgcacattatctggttgacgggatgacaaactcattggagtcagcaaggcagggtactgctaagttgacaacttggctgggacgccaattggggatattggggaagaaactggagaacaaaagcaagacctggttcggcgcatacgcctagtaa

SEQ ID NO: 765 - DNA, 348 bp, Artificial Sequence
  Chemically Synthesized
tgtgacattccacagtctaccaattgcggaggcaacgtctattccaatgacgacatcaataccgccatccagggcgctctggacgacgtggcaaatggggaccggcctgacaactaccctcaccagtattatgatgaggcaagcgaggacataacattgtgctgcggttccggcccttggtccgaatttcctttggtctataacggcccctactacagcagtcgggataactacgttagtccaggtccggatagggtgatctaccagactaacaccggggaattttgcgcaacagtgacacatactggtgctgcctcatacgatggtttcactcagtgttcttagtaa

SEQ ID NO: 766 - DNA, 633 bp, Artificial Sequence
  Chemically Synthesized
agggagcgaccggatggaagagagagcctttcccatgtgccaatagtcgcggtgtcaactagggtggacacggggaacggcagtatggagttggaaatccgaccgctttttctggttcctgatactaatggtttcatagaccacctcgcgtccctcgctcgattgctggaaagcaggaaatacatccttgtagtcccactcatcgtaataaatgaactcgacggtttggccaagggtcaagaaacggaccatcgagctggcggctacgcacgagttgttcaggaaaaagcacgaaagtctatcgagttcttggagcagcgattcgagagtagagattcctgccttagggcgctcaccagccggggaaatgagcttgagagcatcgctttccgaagcgaggacattactggtcaactcgggaacaatgacgatctcattctgtcctgctgtcttcactattgcaaggataaggcgaaagatttcatgccggcaagtaaggaagagccgatccggcttctgcgggaagtcgtgctccttactgacgatagaaatttgcgcgtgaaagccttgactcgaaacgtccctgttagggacattcctgcgttcctcacctgggcgcaggtcgggtagtaa

SEQ ID NO: 767 - DNA, 1134 bp, Artificial Sequence
  Chemically Synthesized
atggaacttgagatcagacctctctttcttgtaccggatactaatgggttcatagaccatcttgcatccctcgctagacttctggaaagccgcaaatacatattggttgtgcctcttattgttatcaatgaactggacgggcttgcgaaggggcaagagacagatcatagggcaggtggctacgctagggtagtgcaggaaaaagcgagaaaatctatagaatttttggagcagagattcgaaagtagagattcttgtctccgcgctctgacctcacgcggtaacgagcttgaaagtatcgcatttagatcagaggacataacagggcagctcggtaacaatgatgacctgatactcagctgttgcctccattattgtaaagacaaggctaaagattttatgcctgcaagtaaggaagagccgataagactcttgagggaggtagtgcttctgaccgacgataggaatctcagagtaaaagcccttacgagaaacgttcctgtcagggacattccagcctttctcacttgggcccaggttggtggcgggggctcagggggtgggggttccggtgggggtggcagcatggagcttgagatacgcccgctgttcttggtgcctgacactaatggatttattgatcaccttgctagtttggcccggttgctcgaatcaagaaagtatatcttggtagtgcccttgatcgtgatcaacgaacttgacggactggccaaaggtcaggaaacggaccatagagctggtggatacgctagggttgtccaagaaaaggcgcgaaagagtatagagttccttgagcagcgctttgagtctcgggatagttgcctccgagccctgacgtcaaggggcaatgaattggaatccatcgcattcaggtccgaagatataaccgggcagttggggaataatgacgatctcattctttcctgctgtctgcattactgtaaagataaagcaaaggatttcatgcccgcgagcaaagaggaaccaattagattgttgagagaagtcgtactcctcacagatgatagaaatctgcgggtgaaggctttgaccagaaacgtaccagtccgcgacattcctgcctttttgacgtgggcacaggtggggtagtaa

SEQ ID NO: 768 - DNA, 372 bp, Artificial Sequence
  Chemically Synthesized
aaggagagcgcagctgccaagtttgagaggcaacacatggactccgggaatagcccttcctcctctagtaactactgcaatctgatgatgtgctgccgcaaaatgactcaggggaagtgcaaaccagtaaatacttttgttcacgagtccttggcggatgtaaaggcagtttgttcccagaagaaagtcacatgtaagaatggacaaacgaactgctatcagtcaaaatcaaccatgcggattactgattgcagggagactggttccagcaagtaccccaactgcgcgtacaagacgacccaggtcgaaaagcacatcattgttgcctgtggcggaaagccgtcagtcccggtgcacttcgatgcgagtgtt

SEQ ID NO: 769 - DNA, 795 bp, Artificial Sequence
  Chemically Synthesized
aaggagagcgcagctgccaagtttgagaggcaacacatggactccgggaatagcccttcctcctctagtaactactgcaatctgatgatgtgctgccgcaaaatgactcaggggaagtgcaaaccagtaaatacttttgttcacgagtccttggcggatgtaaaggcagtttgttcccagaagaaagtcacatgtaagaatggacaaacgaactgctatcagtcaaaatcaaccatgcggattactgattgcagggagactggttccagcaagtaccccaactgcgcgtacaagacgacccaggtcgaaaagcacatcattgttgcctgtggcggaaagccgtcagtcccggtgcacttcgatgcgagtgttgggggtggcggatcaggtggaggaggatctggaggcggtgggtccaaggagagtgcagcggcgaaattcgagcggcaacatatggactctggaaactctccctcatccagtagtaattactgcaatcttatgatgtgctgtaggaaaatgacccaaggaaagtgtaaaccagtaaacacgttcgtgcacgaaagcctcgcggatgtaaaggctgtgtgcagccagaagaaagtgacgtgtaagaatggacagacaaattgttaccagtcaaaaagtacgatgaggatcactgactgtagagaaacgggatcatctaagtatcccaattgcgcctataaaaccactcaagttgaaaaacacattattgtcgcttgtggaggaaaaccgtccgtcccggtgcatttcgacgcctcagtataatag

SEQ ID NO: 770 - DNA, 387 bp, Artificial Sequence
  Chemically Synthesized
ttcagtaacagacctatgccgcttaatttgtaccagttcaagaatatgatacagtgtacagttcccaatcggtcatggtgggattttgctgactatgggtgctactgtggacgaggtggttcaggtacacctgtggatgatctcgacagatgttgtcaggttcatgacaattgctacaatgaagccgagaaaatttctcggtgttggccgtattttaagacgtatagttatgaatgcagccaaggtacattgacttgtaagggtgataacgatgcttgcgccgccgcagtttgtgattgcgacagactcgctgcaatttgcttcgcgggggcaccctataacaataataattacaatatagacctcaaagcccgatgccagtaatag

SEQ ID NO: 771 - DNA, 399 bp, Artificial Sequence
  Chemically Synthesized
ttcgacactattaaagactcaaaacaactgaatggacttgcattggcatatataggcgacgctatatttgaagtttacgtacggcatcaccttctcaagcaggggtttacgaagcctaatgatcttcataaaaagtccagccgaatagttagtgctaaaagccaagccgaaatattgttcttcctccagaatcagtctttctttacggaagaagaagaagctgtgttgaagagaggaaggaacgcgaaaagtggcactacacctaaaaacaccgatgttcagacatatcgctactctactgctttcgaagcccttctcgggtatcttttcctggagaagaaggaggaacgcctctcacaactggttgccgaggcaatccagtttggtactagctagtaa

SEQ ID NO: 772 - DNA, 837 bp, Artificial Sequence
  Chemically Synthesized
ttcgacactattaaagactcaaaacaactgaatggacttgcattggcatatataggcgacgctatatttgaagtttacgtacggcatcaccttctcaagcaggggtttacgaagcctaatgatcttcataaaaagtccagccgaatagttagtgctaaaagccaagccgaaatattgttcttcctccagaatcagtctttctttacggaagaagaagaagctgtgttgaagagaggaaggaacgcgaaaagtggcactacacctaaaaacaccgatgttcagacatatcgctactctactgctttcgaagcccttctcgggtatcttttcctggagaagaaggaggaacgcctctcacaactggttgccgaggcaatccagtttggtactagcggtggcggaggcagtggtgggggcggtagtggtgggggaggatctttcgacacgataaaagactctaaacaattgaacgggctcgcgctggcctatatcggcgacgcgatcttcgaggtttacgtccgccatcacctgttgaaacagggttttactaagccgaatgacttgcacaagaaatccagcaggatagtatccgcaaagtcccaggccgaaatactgttcttcttgcagaaccaatcatttttcacggaggaggaggaggcagttctgaagcgagggaggaacgccaagagtggtacaacaccaaagaatacggatgtacaaacttataggtattctacggcgtttgaggcactccttggctatttgttcctcgaaaagaaagaagagcgcctctctcagctggtagctgaggctattcaattcggcaccagttagtaa

SEQ ID NO: 773 - DNA, 603 bp, Artificial Sequence
  Chemically Synthesized
gatgcagagaaaacgctgaatcacctcatctccgggttcgaaacattcgagaagaaaatcaattatcgattcaagaataaagcctatcttctccaggcgttcacccatgctagttatcactataacaccataacggattgctaccagcgccttgaatttcttggcgatgcaatacttgactaccttatcacaaaacatctttacgaagaccctaggcagcatagcccaggagtgttgaccgatctcagatccgcgcttgtcaacaatacaatctttgcctcccttgccgtgaagtacgactatcataaatatttcaaagcagtctcaccagagttgttccatgtaatcgatgatttcgtaaaatttcagctggagaaaaacgaaatgcaggggatggattctgagcttcgcaggagcgaggaggatgaggagaaggaagaggacattgaagtccccaaagctatgggcgacatttttgagtcccttgcaggggcgatctatatggacagcggcatgagtcttgaggttgtctggcaggtctactatcccatgatgcagccattgatcgagaaattctcagcgaacgtgccccgatcctagtaa

SEQ ID NO: 774 - DNA, 1245 bp, Artificial Sequence
  Chemically Synthesized
gatgcagagaaaacgctgaatcacctcatctccgggttcgaaacattcgagaagaaaatcaattatcgattcaagaataaagcctatcttctccaggcgttcacccatgctagttatcactataacaccataacggattgctaccagcgccttgaatttcttggcgatgcaatacttgactaccttatcacaaaacatctttacgaagaccctaggcagcatagcccaggagtgttgaccgatctcagatccgcgcttgtcaacaatacaatctttgcctcccttgccgtgaagtacgactatcataaatatttcaaagcagtctcaccagagttgttccatgtaatcgatgatttcgtaaaatttcagctggagaaaaacgaaatgcaggggatggattctgagcttcgcaggagcgaggaggatgaggagaaggaagaggacattgaagtccccaaagctatgggcgacatttttgagtcccttgcaggggcgatctatatggacagcggcatgagtcttgaggttgtctggcaggtctactatcccatgatgcagccattgatcgagaaattctcagcgaacgtgccccgatccggcggcggtggttctggtggcggagggagtggtggtggtgggagcgatgctgaaaaaacgttgaaccatttgatctccggctttgaaacgtttgagaagaagataaactatcgatttaagaataaggcttatctgctccaagcatttacccatgcgtcctatcattataacacaattaccgattgttaccaacgattggagttcttgggggacgctatattggactacctgatcactaaacatctctatgaagacccgcgacagcacagccctggagtcttgactgatcttaggagtgctcttgttaataacacgattttcgcgtcactcgcagtaaaatatgactaccataagtattttaaagccgtatctcccgaactgttccatgtcattgatgacttcgtgaagttccaacttgaaaagaacgaaatgcagggaatggatagcgaactgcggcggagcgaagaagatgaggaaaaggaggaagacatcgaagtaccgaaagcaatgggggatattttcgagtctctggccggcgcaatctacatggactccggtatgagcttggaggtcgtgtggcaagtctactacccaatgatgcaacccctgattgaaaagttttccgcgaacgttccaaggagctagtaa

SEQ ID NO: 775 - DNA, 972 bp, Artificial Sequence
  Chemically Synthesized
ccgaagtatggtgatcgaaaggttcatcatatgcacatgcgaaagaagggcattaacaccttgattaatataatgtctaggcttggtcaagatgatccgacaccgtcacgaatcaaccacaacgagaggttggagttcctcggagatgctgtcgtagagtttctcacatcagtacatctttattaccttttcccgtcactcgaagagggagggcttgctacctatcggaccgcgattgtacagaatcaacacctcgccatgcttgccaagaaacttgagctggatagattcatgttgtatgcgcatggaccagatttgtgtcgggagagtgaccttcggcacgcgatggctaattgttttgaggctttgataggggcagtttacctcgaaggaagtctggaagaggctaagcagctctttggacgacttctcttcaacgaccccgacttgcgcgaagtttggttgaactacccactgcacccgctccagctccaagaaccaaataccgaccggcagctgatcgaaacctcacctgttctccagaaattgacggagtttgaggaggccattggcgtaatcttcacgcatgtaaggcttttggctcgcgcgttcaccttgcggactgtgggatttaatcatttgacgctgggtcacaaccaaaggatggaatttctgggggatagcatcatgcagctcgttgccaccgaatatttgtttattcactttcccgatcatcacgaagggcacttgaccttgcttcgatccagcctggtcaataaccggacacaggcaaaggtcgctgaagaactcggcatgcaagaatacgcaatcactaatgataaaacaaaacggcctgttgctttgcgaaccaagactcttgccgaccttctcgaatcatttatagctgcgctttacatagataaggacttggagtacgtgcatacgttcatgaacgtgtgcttcttttaatag

SEQ ID NO: 776 - DNA, 1395 bp, Artificial Sequence
  Chemically Synthesized
attggaggagagcgatacttcgcaatcacggcgggtttgagactcgaccagggacgcgggagagggctcgccgggtggcgcacccctttcggtcctttcggcgtgtcacatacagatgtatttcagcggcttgaacttttgggtgatgcggtgcttggattcatagtaacggcccgcctcctctgcctctttccggacgcatctgtagggaccttggtagaacttaaaatggagttggttagaaatgaggcacttaactacctggtgcagacgcttgggctgcctcagctggctgagttctccaacaatctggtagcaaagtcaaagacctgggctgatatgtacgaagaaatagtggggtccattttcactggtcccaatgggatttacgggtgtgaggagttcctggcgaaaactctgatgtctccggagcattccaagactgtgggttccgcttgccctgacgcggttacaaaggcaagtaaaagagtatgtatgggcgaggcaggcgcacatgagtttcgcagtctcgtcgattatgcgtgcgaacaaggcatctctgtgttctgctcctctcgggtatccacaatgttcctggagagacttcgagatattccagccgaggatatgttggactggtatcgcttgggcattcaattctcccacaggtctggtctttcaggcccaggaggggtcgtatctgtcatcgacataatgacacacctggctcggggtctttggctgggctcacctgggttctacgtggagcaacaaacggacaaaaatgaatccgcatgcccacctacaataccagtcctctacatctaccataggtcagtgcagtgtccggtactttatggctcattgacagagactccgacggggcctgtcgcctccaaagtcctcgcgctctacgagaagatcctggcgtacgagagtagtggcggaagtaaacacattgcggcgcaaacggtcagccggtctttggcggtgccaatcccgtcagggactattccatttcttatccggcttctgcaaattgcgttgacccctcacgtttatcaaaagttggaactgctgggagatgctttccttaaatgcagcctggcattgcacctccacgcgcttcacccgacgctcacagaaggtgctctcactcgaatgagacagagcgcagaaactaactccgttctcggtcggttgactaaaagatttcccagcgtcgtttcagaggtaatcattgaaagtcatccgaaaattcaaccagatagtaaggtatatggggatactttcgaggccatcttggcggcaatacttctcgcttgtggtgaggaggccgcaggtgcgtttgttcgagagcatgtacttccacaagttgttgccgacgcttaatag

SEQ ID NO: 777 - DNA, 933 bp, Artificial Sequence
  Chemically Synthesized
aacccgatagtcattaataggctccaacggaaattgggatataccttcaaccatcaggagctgctgcagcaggcacttacccacagaagtgcttcttctaagcacaacgaacgcttggagtttttgggagattctatactgtcatacgtgattgccaacgccctctaccatcggtttccgcgcgtggacgaaggcgacatgtcccgcatgagggctacccttgttcgcgggaacacgcttgcggaacttgccagggagttcgagttgggcgagtgcctgcgactcgggcctggggaactgaaatcaggtggatttaggagagagtctattctcgctgatactgtggaggccctgattgggggagtatttttggactccgacatccaaaccgtcgagaaattgatcctgaattggtatcagacacgccttgacgaaatatctggaggtggcggaagcggaggcggtggtagcggaggtggaggcagtaatcctatcgtcataaaccggcttcaacggaaactcggatatacgtttaatcatcaagaactcttgcaacaggcattgacgcacagatccgcaagcagtaagcacaacgaaaggcttgagttccttggagattccatactttcctatgtcatcgctaatgctttgtaccatagatttcctagggtggatgagggcgatatgagtcggatgcgcgcaactctcgttcggggcaatacgcttgcagaactcgcaagagagttcgagcttggtgaatgtctgcggctgggtccgggcgaattgaagagtggtggatttcgccgagagagtatcctggcggacacggttgaagcactcatcggtggagtgtttttggatagtgacatccagactgtcgagaaactgattcttaattggtatcagaccagattggatgaaatatcttagtaa

SEQ ID NO: 778 - DNA, 450 bp, Artificial Sequence
  Chemically Synthesized
atcattggttatttcgacggtctttgcgagccgaagaaccctggtggtattgcgaccttcgggttcgtgatctatctcgacaaccggaaaatagaaggctacggccttgcagagaagccattttctataaattccaccaacaatgttgctgagtattcagggcttatatgccttatggaaacgatgctccgcctcggcatcagttccccgatcatcaaaggagacagccaactcgtaattaagcaaatgaacggagagtacaaggtcaaggcgaaaaggattatacccctgtacgaaaaggccatcgagttgaagaagaagctgaacgcaacccttatatgggtcccccgagaggagaataaagaagcagatagactcagtagggttgcttatgaattggttaggagggggaagctgagggacataggttgtatcatacttacatagtaa

SEQ ID NO: 779 - DNA, 450 bp, Artificial Sequence
  Chemically Synthesized
atcattggttatttcgacggtctttgcgagccgaagaaccctggtggtattgcgaccttcgggttcgtgatctatctcgacaaccggaaaatagaaggctacggccttgcagagaagccattttctataaattccaccaacaatgttgctgagtattcagggcttatatgccttatggaaacgatgctccgcctcggcatcagttccccgatcatcaaaggagacagccaactcgtaattaagcaaatgaacggagagtacaaggtcaaggcgaaaaggattatacccctgtacgaaaaggccatcgagttgaagaagaagctgaacgcaacccttatatgggtcccccgagaggagaataaagaagcaaacagactcagtagggttgcttatgaattggttaggagggggaagctgagggacataggttgtatcatacttacatagtaa

SEQ ID NO: 780 - DNA, 330 bp, Artificial Sequence
  Chemically Synthesized
agcagctccacctactgtaaccaaatgatgaggcgccggaatatgacacaggggcggtgcaaaccagtgaacacctttgtgcacgagcccctggtagatgtccagaatgtctgtttccaggaaaaggtcacctgcaagaacgggcagggcaactgctacaagagcaactccagcatgcacatcacagactgccgcctgacaaacggctccaggtaccccaactgtgcataccggaccagcccgaaggagagacacatcattgtggcctgtgaagggagcccatatgtgccagtccactttgatgcttctgtggaggactctacctagtaa

SEQ ID NO: 781 - DNA, 63 bp, Artificial Sequence
  Chemically Synthesized
atgaaggaatcccgggccaagaaattccagcggcagcatatggactcagacagttcctagtaa

SEQ ID NO: 782 - DNA, 568 bp, Artificial Sequence
  Chemically Synthesized
atgaaggaatcccgggccaagaaattccagcggcagcatatggactcagacagttccggcggtggaggtagtggagggggaggatcactcgagccatctgctggagacatgagagctgccaacctttggccaagcccgctcatgatcaaacgctctaagaagaacagcctggccttgtccctgacggccgaccagatggtcagtgccttgttggatgctgagccccccatactctattccgagtatgatcctaccagacccttcagtgaagcttcgatgatgggcttactgaccaacctggcagacagggagctggttcacatgatcaactgggcgaagagggtgccaggctttgtggatttgaccctccatgatcaggtccaccttctagaatgtgcctggctagagatcctgatgattggtctcgtctggcgctccatggagcacccagtgaagctactgtttgctcctaacttgctcttggacaggaaccagggaaaatgtgtagagggcatggtggagatcttcgacatgctgctggctacatcatctcggttccgcatgatga

SEQ ID NO: 783 - DNA, 330 bp, Artificial Sequence
  Chemically Synthesized
tcttccagcacgtattgtaatcagatgatgaaactgcgaaacatgacccagggttggtgcaaaagtgttaatacattcgtccacgaaccattggttgatgttcaaaatgtctgttttcaagagaaagtgacttgcaagaacggccagacaaactgttttaaaagtaatagtaagatgcacatcactgagtgtcgccttaccaacggatcaaaatacccgaactgtgcgtatcagacgagtcccaaggagaggcacataatagtggcgtgcgaaggctccccgtatgtacctgtgcatttcgacgattcagtcgaagacagcacatagtaa

SEQ ID NO: 784 - DNA, 57 bp, Artificial Sequence
  Chemically Synthesized
atgggtgagtcacaagctgagaaatttcaacggcagcacatggactctgggtcaagc

SEQ ID NO: 785 - DNA, 568 bp, Artificial Sequence
  Chemically Synthesized
atgggtgagtcacaagctgagaaatttcaacggcagcacatggactctgggtcaagcggcggtggaggtagtggagggggaggatcactcgagccatctgctggagacatgagagctgccaacctttggccaagcccgctcatgatcaaacgctctaagaagaacagcctggccttgtccctgacggccgaccagatggtcagtgccttgttggatgctgagccccccatactctattccgagtatgatcctaccagacccttcagtgaagcttcgatgatgggcttactgaccaacctggcagacagggagctggttcacatgatcaactgggcgaagagggtgccaggctttgtggatttgaccctccatgatcaggtccaccttctagaatgtgcctggctagagatcctgatgattggtctcgtctggcgctccatggagcacccagtgaagctactgtttgctcctaacttgctcttggacaggaaccagggaaaatgtgtagagggcatggtggagatcttcgacatgctgctggctacatcatctcggttccgcatgatga

SEQ ID NO: 786 - DNA, 318 bp, Artificial Sequence
  Chemically Synthesized
agttcttccaattactgtaatcaaatgatgaagagccgaaacttgactaaggatagatgtaaacccgtaaatacattcgttcacgaatcactggcggatgtacaagcggtttgtagccaaaagaatgtagcatgtaagaacggtcagacaaattgctaccagagctatagtacaatgagtatcaccgattgtcgagagacaggctctagtaaatatccaaattgcgcttacaagacaacgcaggcaaacaagcacataattgtcgcgtgcgagggcaatccctatgtgccagtgcatttcgacgcctctgtgtagtaa

SEQ ID NO: 787 - DNA, 63 bp, Artificial Sequence
  Chemically Synthesized
atgaaggaaactgccgccgccaagtttgagagacaacacatggatagtagcacgtctgccgcg

SEQ ID NO: 788 - DNA, 574 bp, Artificial Sequence
  Chemically Synthesized
atgaaggaaactgccgccgccaagtttgagagacaacacatggatagtagcacgtctgccgcgggcggtggaggtagtggagggggaggatcactcgagccatctgctggagacatgagagctgccaacctttggccaagcccgctcatgatcaaacgctctaagaagaacagcctggccttgtccctgacggccgaccagatggtcagtgccttgttggatgctgagccccccatactctattccgagtatgatcctaccagacccttcagtgaagcttcgatgatgggcttactgaccaacctggcagacagggagctggttcacatgatcaactgggcgaagagggtgccaggctttgtggatttgaccctccatgatcaggtccaccttctagaatgtgcctggctagagatcctgatgattggtctcgtctggcgctccatggagcacccagtgaagctactgtttgctcctaacttgctcttggacaggaaccagggaaaatgtgtagagggcatggtggagatcttcgacatgctgctggctacatcatctcggttccgcatgatga

SEQ ID NO: 789 - DNA, 210 bp, Artificial Sequence
  Chemically Synthesized
aaggaaacggcagcagccaagtttgagagacaacacatggatagtagcaccagtgccgctggtgggagcggcggcaaggagactgcagctgctaaattcgagcgacaacacatggactcctccacaagcgcagcaggcggctctggtggcaaagagaccgccgctgcaaagtttgagaggcaacatatggactcaagtacctctgcagct

SEQ ID NO: 790 - DNA, 42 bp, Artificial Sequence
  Chemically Synthesized
tcgcgaggcggtggaggtagtggagggggaggatcaacgcgt

SEQ ID NO: 791 - DNA, 39 bp, Artificial Sequence
  Chemically Synthesized
cgaggcggtggaggtagtggagggggaggatcaacgcgt

SEQ ID NO: 792 - DNA, 39 bp, Artificial Sequence
  Chemically Synthesized
ggcggtggaggtagtggagggggaggatcactcgagcca

SEQ ID NO: 793 - DNA, 66 bp, Artificial Sequence
  Chemically Synthesized
gactacaaagaccatgacggtgattataaagatcatgacatcgattacaaggatgacgatgacaag

SEQ ID NO: 794 - DNA, 117 bp, Artificial Sequence
  Chemically Synthesized
aactcaaagaaaaggtcactggaggacaacgaaacggaaatcaaagtctccagagacacctggaacactaagaacatgcggtccctggaaccgccacgaagcaagaaacggatacat

SEQ ID NO: 795 - DNA, 3471 bp, Artificial Sequence
  Chemically Synthesized
atggactacaaagaccatgacggtgattataaagatcatgacatcgattacaaggatgacgatgacaagggcggaaactcaaagaaaaggtcactggaggacaacgaaacggaaatcaaagtctccagagacacctggaacactaagaacatgcggtccctggaaccgccacgaagcaagaaacggatacatggaggcaacatccccgctctggtggaaaaccagaagaagtactttggcacctacagcgtgatggccatgctgaacgctcagaccgtgctggaccacatccagaaggtggccgatattgagggcgagcagaacgagaacaacgagaatctgtggtttcaccccgtgatgagccacctgtacaacgccaagaacggctacgacaagcagcccgagaaaaccatgttcatcatcgagcggctgcagagctacttcccattcctgaagatcatggccgagaaccagagagagtacagcaacggcaagtacaagcagaaccgcgtggaagtgaacagcaacgacatcttcgaggtgctgaagcgcgccttcggcgtgctgaagatgtacagggacctgaccaaccactacaagacctacgaggaaaagctgaacgacggctgcgagttcctgaccagcacagagcaacctctgagcggcatgatcaacaactactacacagtggccctgcggaacatgaacgagagatacggctacaagacagaggacctggccttcatccaggacaagcggttcaagttcgtgaaggacgcctacggcaagaaaaagtcccaagtgaataccggattcttcctgagcctgcaggactacaacggcgacacacagaagaagctgcacctgagcggagtgggaatcgccctgctgatctgcctgttcctggacaagcagtacatcaacatctttctgagcaggctgcccatcttctccagctacaatgcccagagcgaggaacggcggatcatcatcagatccttcggcatcaacagcatcaagctgcccaaggaccggatccacagcgagaagtccaacaagagcgtggccatggatatgctcaacgaagtgaagcggtgccccgacgagctgttcacaacactgtctgccgagaagcagtcccggttcagaatcatcagcgacgaccacaatgaagtgctgatgaagcggagcagcgacagattcgtgcctctgctgctgcagtatatcgattacggcaagctgttcgaccacatcaggttccacgtgaacatgggcaagctgagatacctgctgaaggccgacaagacctgcatcgacggccagaccagagtcagagtgatcgagcagcccctgaacggcttcggcagactggaagaggccgagacaatgcggaagcaagagaacggcaccttcggcaacagcggcatccggatcagagacttcgagaacatgaagcgggacgacgccaatcctgccaactatccctacatcgtggacacctacacacactacatcctggaaaacaacaaggtcgagatgtttatcaacgacaaagaggacagcgccccactgctgcccgtgatcgaggatgatagatacgtggtcaagacaatccccagctgccggatgagcaccctggaaattccagccatggccttccacatgtttctgttcggcagcaagaaaaccgagaagctgatcgtggacgtgcacaaccggtacaagagactgttccaggccatgcagaaagaagaagtgaccgccgagaatatcgccagcttcggaatcgccgagagcgacctgcctcagaagatcctggatctgatcagcggcaatgcccacggcaaggatgtggacgccttcatcagactgaccgtggacgacatgctgaccgacaccgagcggagaatcaagagattcaaggacgaccggaagtccattcggagcgccgacaacaagatgggaaagagaggcttcaagcagatctccacaggcaagctggccgacttcctggccaaggacatcgtgctgtttcagcccagcgtgaacgatggcgagaacaagatcaccggcctgaactaccggatcatgcagagcgccattgccgtgtacgatagcggcgacgattacgaggccaagcagcagttcaagctgatgttcgagaaggcccggctgatcggcaagggcacaacagagcctcatccatttctgtacaaggtgttcgcccgcagcatccccgccaatgccgtcgagttctacgagcgctacctgatcgagcggaagttctacctgaccggcctgtccaacgagatcaagaaaggcaacagagtggatgtgcccttcatccggcgggaccagaacaagtggaaaacacccgccatgaagaccctgggcagaatctacagcgaggatctgcccgtggaactgcccagacagatgttcgacaatgagatcaagtcccacctgaagtccctgccacagatggaaggcatcgacttcaacaatgccaacgtgacctatctgatcgccgagtacatgaagagagtgctggacgacgacttccagaccttctaccagtggaaccgcaactaccggtacatggacatgcttaagggcgagtacgacagaaagggctccctgcagcactgcttcaccagcgtggaagagagagaaggcctctggaaagagcgggcctccagaacagagcggtacagaaagcaggccagcaacaagatccgcagcaaccggcagatgagaaacgccagcagcgaagagatcgagacaatcctggataagcggctgagcaacagccggaacgagtaccagaaaagcgagaaagtgatccggcgctacagagtgcaggatgccctgctgtttctgctggccaaaaagaccctgaccgaactggccgatttcgacggcgagaggttcaaactgaaagaaatcatgcccgacgccgagaagggaatcctgagcgagatcatgcccatgagcttcaccttcgagaaaggcggcaagaagtacaccatcaccagcgagggcatgaagctgaagaactacggcgacttctttgtgctggctagcgacaagaggatcggcaacctgctggaactcgtgggcagcgacatcgtgtccaaagaggatatcatggaagagttcaacaaatacgaccagtgcaggcccgagatcagctccatcgtgttcaacctggaaaagtgggccttcgacacataccccgagctgtctgccagagtggaccgggaagagaaggtggacttcaagagcatcctgaaaatcctgctgaacaacaagaacatcaacaaagagcagagcgacatcctgcggaagatccggaacgccttcgatcacaacaattaccccgacaaaggcgtggtggaaatcaaggccctgcctgagatcgccatgagcatcaagaaggcctttggggagtacgccatcatgaagtagtaa

SEQ ID NO: 796 - DNA, 3507 bp, Artificial Sequence
  Chemically Synthesized
atggactacaaagaccatgacggtgattataaagatcatgacatcgattacaaggatgacgatgacaagggcggaaactcaaagaaaaggtcactggaggacaacgaaacggaaatcaaagtctccagagacacctggaacactaagaacatgcggtccctggaaccgccacgaagcaagaaacggatacatggaggcaacatccccgctctggtggaaaaccagaagaagtactttggcacctacagcgtgatggccatgctgaacgctcagaccgtgctggaccacatccagaaggtggccgatattgagggcgagcagaacgagaacaacgagaatctgtggtttcaccccgtgatgagccacctgtacaacgccaagaacggctacgacaagcagcccgagaaaaccatgttcatcatcgagcggctgcagagctacttcccattcctgaagatcatggccgagaaccagagagagtacagcaacggcaagtacaagcagaaccgcgtggaagtgaacagcaacgacatcttcgaggtgctgaagcgcgccttcggcgtgctgaagatgtacagggacctgaccaacgcatacaagacctacgaggaaaagctgaacgacggctgcgagttcctgaccagcacagagcaacctctgagcggcatgatcaacaactactacacagtggccctgcggaacatgaacgagagatacggctacaagacagaggacctggccttcatccaggacaagcggttcaagttcgtgaaggacgcctacggcaagaaaaagtcccaagtgaataccggattcttcctgagcctgcaggactacaacggcgacacacagaagaagctgcacctgagcggagtgggaatcgccctgctgatctgcctgttcctggacaagcagtacatcaacatctttctgagcaggctgcccatcttctccagctacaatgcccagagcgaggaacggcggatcatcatcagatccttcggcatcaacagcatcaagctgcccaaggaccggatccacagcgagaagtccaacaagagcgtggccatggatatgctcaacgaagtgaagcggtgccccgacgagctgttcacaacactgtctgccgagaagcagtcccggttcagaatcatcagcgacgaccacaatgaagtgctgatgaagcggagcagcgacagattcgtgcctctgctgctgcagtatatcgattacggcaagctgttcgaccacatcaggttccacgtgaacatgggcaagctgagatacctgctgaaggccgacaagacctgcatcgacggccagaccagagtcagagtgatcgagcagcccctgaacggcttcggcagactggaagaggccgagacaatgcggaagcaagagaacggcaccttcggcaacagcggcatccggatcagagacttcgagaacatgaagcgggacgacgccaatcctgccaactatccctacatcgtggacacctacacacactacatcctggaaaacaacaaggtcgagatgtttatcaacgacaaagaggacagcgccccactgctgcccgtgatcgaggatgatagatacgtggtcaagacaatccccagctgccggatgagcaccctggaaattccagccatggccttccacatgtttctgttcggcagcaagaaaaccgagaagctgatcgtggacgtgcacaaccggtacaagagactgttccaggccatgcagaaagaagaagtgaccgccgagaatatcgccagcttcggaatcgccgagagcgacctgcctcagaagatcctggatctgatcagcggcaatgcccacggcaaggatgtggacgccttcatcagactgaccgtggacgacatgctgaccgacaccgagcggagaatcaagagattcaaggacgaccggaagtccattcggagcgccgacaacaagatgggaaagagaggcttcaagcagatctccacaggcaagctggccgacttcctggccaaggacatcgtgctgtttcagcccagcgtgaacgatggcgagaacaagatcaccggcctgaactaccggatcatgcagagcgccattgccgtgtacgatagcggcgacgattacgaggccaagcagcagttcaagctgatgttcgagaaggcccggctgatcggcaagggcacaacagagcctcatccatttctgtacaaggtgttcgcccgcagcatccccgccaatgccgtcgagttctacgagcgctacctgatcgagcggaagttctacctgaccggcctgtccaacgagatcaagaaaggcaacagagtggatgtgcccttcatccggcgggaccagaacaagtggaaaacacccgccatgaagaccctgggcagaatctacagcgaggatctgcccgtggaactgcccagacagatgttcgacaatgagatcaagtcccacctgaagtccctgccacagatggaaggcatcgacttcaacaatgccaacgtgacctatctgatcgccgagtacatgaagagagtgctggacgacgacttccagaccttctaccagtggaaccgcaactaccggtacatggacatgcttaagggcgagtacgacagaaagggctccctgcagcactgcttcaccagcgtggaagagagagaaggcctctggaaagagcgggcctccagaacagagcggtacagaaagcaggccagcaacaagatccgcagcaaccggcagatgagaaacgccagcagcgaagagatcgagacaatcctggataagcggctgagcaacagccggaacgagtaccagaaaagcgagaaagtgatccggcgctacagagtgcaggatgccctgctgtttctgctggccaaaaagaccctgaccgaactggccgatttcgacggcgagaggttcaaactgaaagaaatcatgcccgacgccgagaagggaatcctgagcgagatcatgcccatgagcttcaccttcgagaaaggcggcaagaagtacaccatcaccagcgagggcatgaagctgaagaactacggcgacttctttgtgctggctagcgacaagaggatcggcaacctgctggaactcgtgggcagcgacatcgtgtccaaagaggatatcatggaagagttcaacaaatacgaccagtgcaggcccgagatcagctccatcgtgttcaacctggaaaagtgggccttcgacacataccccgagctgtctgccagagtggaccgggaagagaaggtggacttcaagagcatcctgaaaatcctgctgaacaacaagaacatcaacaaagagcagagcgacatcctgcggaagatccggaacgccttcgatgcaaacaattaccccgacaaaggcgtggtggaaatcaaggccctgcctgagatcgccatgagcatcaagaaggcctttggggagtacgccatcatgaagtcgcgaggcggtggaggtagtggagggggaggatcaacgcgt

SEQ ID NO: 797 - DNA, 3183 bp, Artificial Sequence
  Chemically Synthesized
atggactacaaagaccatgacggtgattataaagatcatgacatcgattacaaggatgacgatgacaagggcggaaactcaaagaaaaggtcactggaggacaacgaaacggaaatcaaagtctccagagacacctggaacactaagaacatgcggtccctggaaccgccacgaagcaagaaacggatacatggaggcaacatccccgctctggtggaaaaccagaagaagtactttggcacctacagcgtgatggccatgctgaacgctcagaccgtgctggaccacatccagaaggtggccgatattgagggcgagcagaacgagaacaacgagaatctgtggtttcaccccgtgatgagccacctgtacaacgccaagaacggctacgacaagcagcccgagaaaaccatgttcatcatcgagcggctgcagagctacttcccattcctgaagatcatggccgagaaccagagagagtacagcaacggcaagtacaagcagaaccgcgtggaagtgaacagcaacgacatcttcgaggtgctgaagcgcgccttcggcgtgctgaagatgtacagggacctgaccaacgcatacaagacctacgaggaaaagctgaacgacggctgcgagttcctgaccagcacagagcaacctctgagcggcatgatcaacaactactacacagtggccctgcggaacatgaacgagagatacggctacaagacagaggacctggccttcatccaggacaagcggttcaagttcgtgaaggacgcctacggcaagaaaaagtcccaagtgaataccggattcttcctgagcctgcaggactacaacggcgacacacagaagaagctgcacctgagcggagtgggaatcgccctgctgatctgcctgttcctggacaagcagtacatcaacatctttctgagcaggctgcccatcttctccagctacaatgcccagagcgaggaacggcggatcatcatcagatccttcggcatcaacagcatcaagctgcccaaggaccggatccacagcgagaagtccaacaagagcgtggccatggatatgctcaacgaagtgaagcggtgccccgacgagctgttcacaacactgtctgccgagaagcagtcccggttcagaatcatcagcgacgaccacaatgaagtgctgatgaagcggagcagcgacagattcgtgcctctgctgctgcagtatatcgattacggcaagctgttcgaccacatcaggttccacgtgaacatgggcaagctgagatacctgctgaaggccgacaagacctgcatcgacggccagaccagagtcagagtgatcgagcagcccctgaacggcttcggcagactggaagaggccgagacaatgcggaagcaagagaacggcaccttcggcaacagcggcatccggatcagagacttcgagaacatgaagcgggacgacgccaatcctgccaactatccctacatcgtggacacctacacacactacatcctggaaaacaacaaggtcgagatgtttatcaacgacaaagaggacagcgccccactgctgcccgtgatcgaggatgatagatacgtggtcaagacaatccccagctgccggatgagcaccctggaaattccagccatggccttccacatgtttctgttcggcagcaagaaaaccgagaagctgatcgtggacgtgcacaaccggtacaagagactgttccaggccatgcagaaagaagaagtgaccgccgagaatatcgccagcttcggaatcgccgagagcgacctgcctcagaagatcctggatctgatcagcggcaatgcccacggcaaggatgtggacgccttcatcagactgaccgtggacgacatgctgaccgacaccgagcggagaatcaagagattcaaggacgaccggaagtccattcggagcgccgacaacaagatgggaaagagaggcttcaagcagatctccacaggcaagctggccgacttcctggccaaggacatcgtgctgtttcagcccagcgtgaacgatggcgagaacaagatcaccggcctgaactaccggatcatgcagagcgccattgccgtgtacgatagcggcgacgattacgaggccaagcagcagttcaagctgatgttcgagaaggcccggctgatcggcaagggcacaacagagcctcatccatttctgtacaaggtgttcgcccgcagcatccccgccaatgccgtcgagttctacgagcgctacctgatcgagcggaagttctacctgaccggcctgtccaacgagatcaagaaaggcaacagagtggatgtgcccttcatccggcgggaccagaacaagtggaaaacacccgccatgaagaccctgggcagaatctacagcgaggatctgcccgtggaactgcccagacagatgttcgacaatgagatcaagtcccacctgaagtccctgccacagatggaaggcatcgacttcaacaatgccaacgtgacctatctgatcgccgagtacatgaagagagtgctggacgacgacttccagaccttctaccagtggaaccgcaactaccggtacatggacatgcttaagggcgagtacgacagaaagggctccctgcagcactgcttcaccagcgtggaagagagagaaggcctctggaaagagcgggcctccagaacagagcggtacagaaagcaggccagcaacaagatccgcagcaaccggcagatgagaaacgccagcagcgaagagatcgagacaatcctggataagcggctgagcaacagccggaacgagtaccagaaaagcgagaaagtgatccggcgctacagagtgcaggatgccctgctgtttctgctggccaaaaagaccctgaccgaactggccgatttcgacggcgagaggttcaaactgaaagaaatcatgcccgacgccgagaagggaatcctgagcgagatcatgcccatgagcttcaccttcgagaaaggcggcaagaagtacaccatcaccagcgagggcatgaagctgaagaactacggcgacttctttgtgctggctagcgacaagaggatcggcaacctgctggaactcgtgggcagcgacatcgtgtccaaagaggatcgaggcggtggaggtagtggagggggaggatcaacgcgt

SEQ ID NO: 798 - DNA, 30 bp, Artificial Sequence
  Chemically Synthesized
gcagcagcagcagcagcagcagcagcagca

SEQ ID NO: 799 - DNA, 31 bp, Artificial Sequence
  Chemically Synthesized
gagcagcagcagcagcagcagcagcagcagc

SEQ ID NO: 800 - DNA, 31 bp, Artificial Sequence
  Chemically Synthesized
gcagcagcagcagcagcagcagcagcagcag

SEQ ID NO: 801 - DNA, 30 bp, Artificial Sequence
  Chemically Synthesized
gtcgttcgcgggcgcaactgcaactccgat

SEQ ID NO: 802 - protein, 11 aa, Artificial Sequence
  Chemically Synthesized
LQLPPLERLTL

SEQ ID NO: 803 - DNA, 33 bp, Artificial Sequence
  Chemically Synthesized
cttcaactgcctccacttgaaagactgacactg

SEQ ID NO: 804 - protein, 16 aa, Artificial Sequence
  Chemically Synthesized
GSLQLPPLERLTLGSS

SEQ ID NO: 805 - DNA, 48 bp, Artificial Sequence
  Chemically Synthesized
ggatcccttcaactgcctccacttgaaagactgacactgggtagttcc

SEQ ID NO: 806 - protein, 32 aa, Artificial Sequence
  Chemically Synthesized
MSVLTPLLLRGLTGSARRLPVPRAKIHSLGDP

SEQ ID NO: 807 - protein, 130 aa, Artificial Sequence
  Chemically Synthesized
MSVLTPLLLRGLTGSARRLPVPRAKIHSLGDPMSVLTPLLLRGLTGSARRLPVPRAKIHSLGKLATMSVLTPLLLRGLTGSARRLPVPRAKIHSLGDPMSVLTPLLLRGLTGSARRLPVPRAKIHSLGKL

SEQ ID NO: 808 - protein, 20 aa, Artificial Sequence
  Chemically Synthesized
MYRMQLLSCIALSLALVTNS

SEQ ID NO: 809 - protein, 43 aa, Artificial Sequence
  Chemically Synthesized
MGCCFSKTAAKGEAAAERPGEAAVASSPSKANGQENGHVKVGS

SEQ ID NO: 810 - protein, 17 aa, Artificial Sequence
  Chemically Synthesized
MLLPVPLLLGLLGAAAD

SEQ ID NO: 811 - protein, 9 aa, Artificial Sequence
  Chemically Synthesized
GITLGKDEL

SEQ ID NO: 812 - protein, 3 aa, Artificial Sequence
  Chemically Synthesized
SKL

SEQ ID NO: 813 - DNA, 96 bp, Artificial Sequence
  Chemically Synthesized
atgagtgtgttgacgccgttgcttctgcgagggcttaccgggtctgctagaagacttccggtccccagggccaagatacatagcctcggagacccg

SEQ ID NO: 814 - DNA, 390 bp, Artificial Sequence
  Chemically Synthesized
atgagtgtgttgacgccgttgcttctgcgagggcttaccgggtctgctagaagacttccggtccccagggccaagatacatagcctcggagacccgatgtctgtgctcactcctctgcttttgcgaggactgactgggtccgccagacgactcccggtgccgagagctaaaatccatagcctgggaaaattggcaactatgtcagtcctgacgccgcttcttctccggggtcttacagggtctgcaagaaggctgcctgtacctcgggcgaaaattcatagcttgggcgacccgatgagtgtattgacgcccctgttgctgagaggattgactgggtcagcgcgccggctccctgtcccccgagctaagattcactcccttggtaagctg

SEQ ID NO: 815 - DNA, 60 bp, Artificial Sequence
  Chemically Synthesized
atgtacaggatgcaactcctgtcttgcattgcactaagtcttgcacttgtcacgaattcc

SEQ ID NO: 816 - DNA, 129 bp, Artificial Sequence
  Chemically Synthesized
atgggttgttgtttcagcaagacagcggcgaaaggtgaagcagcagcagaaagaccaggcgaggctgcggtagcatcaagtccctccaaggctaatgggcaggaaaacggacacgtcaaagttggaagc

SEQ ID NO: 817 - DNA, 51 bp, Artificial Sequence
  Chemically Synthesized
atgctgctgcccgtccccctgctgctgggcctgctgggcgccgccgccgac

SEQ ID NO: 818 - DNA, 30 bp, Artificial Sequence
  Chemically Synthesized
gggatcactctcggcaaggacgagctgtaa

SEQ ID NO: 819 - DNA, 12 bp, Artificial Sequence
  Chemically Synthesized
tccaaattataa

SEQ ID NO: 820 - DNA, 1754 bp, Artificial Sequence
  Chemically synthesized
ctggggcgtcccccatgagcagggccggggaggggccggtagacccaggctcgtctcccaggctgcagcccacctgctcccctcccccgcctgccggctccggtcctcggcgtctgccctgtccccggggaccgcttttcgcggctcaagcgtgttcctgccctgagccggctctcgccccgtctcccgggcccgccgcgctctccccgcgccgtctccgtcccggtccctccctcccgccgcctccctgccctgccccccgccccgcccccgcccgcggcgcgtttctcccccgcctcccgcgtccgtctttgcagcccgcgcctcccgcatcgcctcgcgtccccgtggcgcccgcccgcgcgcgtccgcgccccgccccctcccgcgcggttccgcattggcgtgctgcagggcgcggtgcactgcgccgccaccgtcaataggtggaccccctcccggagataaaaccgccggcgccggcgccgccagtccctctggctgagacctcggctccgggtaaggacgctcggcccccgggcctccgcccccgcccccgtcttccgaagagggacccccggggccggtcctggggggcagagggtggccgggccccgcacccgcccccgcgcgcgcccggagtccggcttccgggggtccccgcgtcggccgggctgggcccggggtggggggcggcgcggggcggcggggccgggtcctgggcggcgatcgccccgtagccgtgaccttggggccgcggggaccctgcgggccgggggctgatgggggtcgggcttcggggcgctgggccagaggacgctgagggaggtggtgagatctgggggccctggcctccccacccccacccgtgttcccaccccagggtggcttctgtcctctttccctcccccagccacctgtccgcgaggagcagcgtgggtttctccactgacctctgtgatgggacagggctgtgacccagggtcctgagtcacagggagggggggagggagggtgccccctatacccccacggggccgagggcatctccacctggcacttgctgggctcggcagggccgggtcctccttcctcaggctggaacagggacccccacctcccggccgctgtctgtccctgtgagagtccgggaggggggtgcctagagctattctgggttcctaatctgggcagcgcatctccgtcggggctctggcccagcctgccgggcagggatgaggggaagatggcgccgtccctgcctgaggaggggagtggggagcagtggccatctctccccggtggcagcgggtgggggtggggcgccgtgtccctggccctgccgccggggaggggagtgcgcgtgcaggacagggccctggagcgctgggcaggtgactcatcacccggctctgctggtcacggacgtacccagcctggcgctgcgtggtctctccaaatggtggctaaccccttcccaaggagcagcccgcgggctccaacgcccagttatttacagcagatggggctgtttgggctcaagtgtggggtgggggcagtgcacagcctctgcttgccctggccaggcccagctgtgggtgggggcccttccctccccaccaaacatgggggcttggtttgtgggcagggatgcctgtccagcctgtgccaggacagtctctgctggtgtctccccctggggctccccatcaccggtctccccaccaccactggccccacagaatcactgcagc

SEQ ID NO: 821 - DNA, 516 bp, Artificial Sequence
  Chemically synthesized
ctggggcgtcccccatgagcagggccggggaggggccggtagacccaggctcgtctcccaggctgcagcccacctgctcccctcccccgcctgccggctccggtcctcggcgtctgccctgtccccggggaccgcttttcgcggctcaagcgtgttcctgccctgagccggctctcgccccgtctcccgggcccgccgcgctctccccgcgccgtctccgtcccggtccctccctcccgccgcctccctgccctgccccccgccccgcccccgcccgcggcgcgtttctcccccgcctcccgcgtccgtctttgcagcccgcgcctcccgcatcgcctcgcgtccccgtggcgcccgcccgcgcgcgtccgcgccccgccccctcccgcgcggttccgcattggcgtgctgcagggcgcggtgcactgcgccgccaccgtcaataggtggaccccctcccggagataaaaccgccggcgccggcgccgccagtccctctggctgagacctcggctc

SEQ ID NO: 822 - DNA, 244 bp, Artificial Sequence
  Chemically synthesized
gcccgcggcgcgtttctcccccgcctcccgcgtccgtctttgcagcccgcgcctcccgcatcgcctcgcgtccccgtggcgcccgcccgcgcgcgtccgcgccccgccccctcccgcgcggttccgcattggcgtgctgcagggcgcggtgcactgcgccgccaccgtcaataggtggaccccctcccggagataaaaccgccggcgccggcgccgccagtccctctggctgagacctcggctc

SEQ ID NO: 823 - DNA, 1425 bp, Artificial Sequence
  Chemically Synthesized
ttctttgtagagcgccgcgtcctcgaccggctgtacggagccgttagcgggcttaagaagaatgagggccagtacaaactcacaagaaaagcgcttagtatgtactgtctcaaggatagtcggttcacaaaggcctgggataaacgggtgcttttgttccgcgacattttggcacagcttggcagaatccctgcagaggcctacgagtattatcatggcgagcaaggagataaaaagcgcgccaatgataacgagggcacaaacccgaaaaggcataaggataaatttatcgagtttgcgctccactatctggaggcccagcacagcgaaatttgcttcggacgccggcacatcgtgagggaagaagctggagctggggatgagcataagaagcatcgcactaaggggaaagttgttgtagatttctccaagaaggacgaagatcaaagctactatatatctaaaaataatgtcattgtacggatagataaaaacgccggaccaagaagctatcgaatgggcctcaacgagctgaagtaccttgtgctcctcagtttgcaaggcaaaggggatgatgcgatagcaaaactttaccgctaccgacagcacgtagaaaacatcttggacgttgtcaaagtgacagacaaggacaaccacgtattcctcccgcgcttcgtacttgagcaacatggaatagggaggaaggcatttaaacaacggattgatggtcgagtgaagcatgttcgcggcgtttgggagaagaagaaagctgcgacgaatgagatgaccttgcacgaaaaagcgcgagacatacttcagtacgtcaacgagaattgtacgcggtccttcaatcccggggaatataaccgactccttgtttgcctggttggtaaggatgttgagaattttcaggctgggttgaaacggctccagctcgctgagagaatcgatggacgggtctatagcattttcgcccaaacaagcacaataaacgagatgcatcaggtagtttgcgaccagatcttgaacagattgtgccggattggcgatcagaaattgtacgattacgtcgggctgggaaagaaggacgaaatcgactacaagcaaaaggttgcttggttcaaggagcatatctccatccggcgcggcttccttcgaaagaaattctggtatgacagcaaaaaggggttcgcaaagttggtagaggaacatctcgaatccgggggaggacagcgcgacgtaggtttggacaagaaatactatcatatcgatgcgattggccggttcgaaggcgctaacccagccctgtatgagaccctggcacgagacagactttgtcttatgatggcacagtactttcttggttccgtgaggaaagaactcggtaacaaaatcgtatggtctaatgattcaatagaattgcca

SEQ ID NO: 824 - DNA, 1665 bp, Artificial Sequence
  Chemically Synthesized
atggactacaaagaccatgacggtgattataaagatcatgacatcgattacaaggatgacgatgacaagggcggaaactcaaagaaaaggtcactggaggacaacgaaacggaaatcaaagtctccagagacacctggaacactaagaacatgcggtccctggaaccgccacgaagcaagaaacggatacatggaggcttctttgtagagcgccgcgtcctcgaccggctgtacggagccgttagcgggcttaagaagaatgagggccagtacaaactcacaagaaaagcgcttagtatgtactgtctcaaggatagtcggttcacaaaggcctgggataaacgggtgcttttgttccgcgacattttggcacagcttggcagaatccctgcagaggcctacgagtattatcatggcgagcaaggagataaaaagcgcgccaatgataacgagggcacaaacccgaaaaggcataaggataaatttatcgagtttgcgctccactatctggaggcccagcacagcgaaatttgcttcggacgccggcacatcgtgagggaagaagctggagctggggatgagcataagaagcatcgcactaaggggaaagttgttgtagatttctccaagaaggacgaagatcaaagctactatatatctaaaaataatgtcattgtacggatagataaaaacgccggaccaagaagctatcgaatgggcctcaacgagctgaagtaccttgtgctcctcagtttgcaaggcaaaggggatgatgcgatagcaaaactttaccgctaccgacagcacgtagaaaacatcttggacgttgtcaaagtgacagacaaggacaaccacgtattcctcccgcgcttcgtacttgagcaacatggaatagggaggaaggcatttaaacaacggattgatggtcgagtgaagcatgttcgcggcgtttgggagaagaagaaagctgcgacgaatgagatgaccttgcacgaaaaagcgcgagacatacttcagtacgtcaacgagaattgtacgcggtccttcaatcccggggaatataaccgactccttgtttgcctggttggtaaggatgttgagaattttcaggctgggttgaaacggctccagctcgctgagagaatcgatggacgggtctatagcattttcgcccaaacaagcacaataaacgagatgcatcaggtagtttgcgaccagatcttgaacagattgtgccggattggcgatcagaaattgtacgattacgtcgggctgggaaagaaggacgaaatcgactacaagcaaaaggttgcttggttcaaggagcatatctccatccggcgcggcttccttcgaaagaaattctggtatgacagcaaaaaggggttcgcaaagttggtagaggaacatctcgaatccgggggaggacagcgcgacgtaggtttggacaagaaatactatcatatcgatgcgattggccggttcgaaggcgctaacccagccctgtatgagaccctggcacgagacagactttgtcttatgatggcacagtactttcttggttccgtgaggaaagaactcggtaacaaaatcgtatggtctaatgattcaatagaattgccatcgcgaggcggtggaggtagtggagggggaggatcaacgcgt

SEQ ID NO: 825 - DNA, 1692 bp, Artificial Sequence
  Chemically Synthesized
ggcggtggaggtagtggagggggaggatcagactacaaagaccatgacggtgattataaagatcatgacatcgattacaaggatgacgatgacaagggcggaaactcaaagaaaaggtcactggaggacaacgaaacggaaatcaaagtctccagagacacctggaacactaagaacatgcggtccctggaaccgccacgaagcaagaaacggatacatggaggcttctttgtagagcgccgcgtcctcgaccggctgtacggagccgttagcgggcttaagaagaatgagggccagtacaaactcacaagaaaagcgcttagtatgtactgtctcaaggatagtcggttcacaaaggcctgggataaacgggtgcttttgttccgcgacattttggcacagcttggcagaatccctgcagaggcctacgagtattatcatggcgagcaaggagataaaaagcgcgccaatgataacgagggcacaaacccgaaaaggcataaggataaatttatcgagtttgcgctccactatctggaggcccagcacagcgaaatttgcttcggacgccggcacatcgtgagggaagaagctggagctggggatgagcataagaagcatcgcactaaggggaaagttgttgtagatttctccaagaaggacgaagatcaaagctactatatatctaaaaataatgtcattgtacggatagataaaaacgccggaccaagaagctatcgaatgggcctcaacgagctgaagtaccttgtgctcctcagtttgcaaggcaaaggggatgatgcgatagcaaaactttaccgctaccgacagcacgtagaaaacatcttggacgttgtcaaagtgacagacaaggacaaccacgtattcctcccgcgcttcgtacttgagcaacatggaatagggaggaaggcatttaaacaacggattgatggtcgagtgaagcatgttcgcggcgtttgggagaagaagaaagctgcgacgaatgagatgaccttgcacgaaaaagcgcgagacatacttcagtacgtcaacgagaattgtacgcggtccttcaatcccggggaatataaccgactccttgtttgcctggttggtaaggatgttgagaattttcaggctgggttgaaacggctccagctcgctgagagaatcgatggacgggtctatagcattttcgcccaaacaagcacaataaacgagatgcatcaggtagtttgcgaccagatcttgaacagattgtgccggattggcgatcagaaattgtacgattacgtcgggctgggaaagaaggacgaaatcgactacaagcaaaaggttgcttggttcaaggagcatatctccatccggcgcggcttccttcgaaagaaattctggtatgacagcaaaaaggggttcgcaaagttggtagaggaacatctcgaatccgggggaggacagcgcgacgtaggtttggacaagaaatactatcatatcgatgcgattggccggttcgaaggcgctaacccagccctgtatgagaccctggcacgagacagactttgtcttatgatggcacagtactttcttggttccgtgaggaaagaactcggtaacaaaatcgtatggtctaatgattcaatagaattgccatcgcgaggcggtggaggtagtggagggggaggatcaacgcgt

SEQ ID NO: 826 - protein, 475 aa, Artificial Sequence
  Chemically Synthesized
FFVERRVLDRLYGAVSGLKKNEGQYKLTRKALSMYCLKDSRFTKAWDKRVLLFRDILAQLGRIPAEAYEYYHGEQGDKKRANDNEGTNPKRHKDKFIEFALHYLEAQHSEICFGRRHIVREEAGAGDEHKKHRTKGKVVVDFSKKDEDQSYYISKNNVIVRIDKNAGPRSYRMGLNELKYLVLLSLQGKGDDAIAKLYRYRQHVENILDVVKVTDKDNHVFLPRFVLEQHGIGRKAFKQRIDGRVKHVRGVWEKKKAATNEMTLHEKARDILQYVNENCTRSFNPGEYNRLLVCLVGKDVENFQAGLKRLQLAERIDGRVYSIFAQTSTINEMHQVVCDQILNRLCRIGDQKLYDYVGLGKKDEIDYKQKVAWFKEHISIRRGFLRKKFWYDSKKGFAKLVEEHLESGGGQRDVGLDKKYYHIDAIGRFEGANPALYETLARDRLCLMMAQYFLGSVRKELGNKIVWSNDSIELP

SEQ ID NO: 827 - protein, 555 aa, Artificial Sequence
  Chemically Synthesized
MDYKDHDGDYKDHDIDYKDDDDKGGNSKKRSLEDNETEIKVSRDTWNTKNMRSLEPPRSKKRIHGGFFVERRVLDRLYGAVSGLKKNEGQYKLTRKALSMYCLKDSRFTKAWDKRVLLFRDILAQLGRIPAEAYEYYHGEQGDKKRANDNEGTNPKRHKDKFIEFALHYLEAQHSEICFGRRHIVREEAGAGDEHKKHRTKGKVVVDFSKKDEDQSYYISKNNVIVRIDKNAGPRSYRMGLNELKYLVLLSLQGKGDDAIAKLYRYRQHVENILDVVKVTDKDNHVFLPRFVLEQHGIGRKAFKQRIDGRVKHVRGVWEKKKAATNEMTLHEKARDILQYVNENCTRSFNPGEYNRLLVCLVGKDVENFQAGLKRLQLAERIDGRVYSIFAQTSTINEMHQVVCDQILNRLCRIGDQKLYDYVGLGKKDEIDYKQKVAWFKEHISIRRGFLRKKFWYDSKKGFAKLVEEHLESGGGQRDVGLDKKYYHIDAIGRFEGANPALYETLARDRLCLMMAQYFLGSVRKELGNKIVWSNDSIELPSRGGGGSGGGGSTR

SEQ ID NO: 828 - protein, 564 aa, Artificial Sequence
  Chemically Synthesized
GGGGSGGGGSDYKDHDGDYKDHDIDYKDDDDKGGNSKKRSLEDNETEIKVSRDTWNTKNMRSLEPPRSKKRIHGGFFVERRVLDRLYGAVSGLKKNEGQYKLTRKALSMYCLKDSRFTKAWDKRVLLFRDILAQLGRIPAEAYEYYHGEQGDKKRANDNEGTNPKRHKDKFIEFALHYLEAQHSEICFGRRHIVREEAGAGDEHKKHRTKGKVVVDFSKKDEDQSYYISKNNVIVRIDKNAGPRSYRMGLNELKYLVLLSLQGKGDDAIAKLYRYRQHVENILDVVKVTDKDNHVFLPRFVLEQHGIGRKAFKQRIDGRVKHVRGVWEKKKAATNEMTLHEKARDILQYVNENCTRSFNPGEYNRLLVCLVGKDVENFQAGLKRLQLAERIDGRVYSIFAQTSTINEMHQVVCDQILNRLCRIGDQKLYDYVGLGKKDEIDYKQKVAWFKEHISIRRGFLRKKFWYDSKKGFAKLVEEHLESGGGQRDVGLDKKYYHIDAIGRFEGANPALYETLARDRLCLMMAQYFLGSVRKELGNKIVWSNDSIELPSRGGGGSGGGGSTR

1. A fusion protein comprising:
a) a CRISPR-associated (Cas) protein; and
b) a RNase protein.

2. The fusion protein of claim 1, wherein the Cas protein is catalytically dead Cas13 (dCas13).

3. The fusion protein of claim 2, wherein dCas13 comprises a sequence selected from SEQ ID NOs: 47-48, or a variant thereof.

4. The fusion protein of claim 1, wherein the RNase comprises a sequence selected from SEQ ID NOs: 49-89, or a variant thereof.

5. The fusion protein of claim 1, wherein the RNase protein is txRNase 1, RNase T1, Ribonuclease HI, PIN RNase, or RNase A.

6. The fusion protein of claim 1, wherein the RNase is a RNase dimer.

7. The fusion protein of claim 6, wherein the RNase dimer comprises a sequence selected from SEQ ID NOs: 57, 77, 79, 82, and 84-87, or a variant thereof.

8. The fusion protein of claim 1, wherein the fusion protein further comprises a nuclear localization signal (NLS).

9. The fusion protein of claim 8, wherein NLS comprises a sequence selected from SEQ ID NOs: 110-730, or a variant thereof.

10. The fusion protein of claim 1, wherein the fusion protein comprises a sequence selected from SEQ ID NOs:732 and 733, and a sequence selected from SEQ ID NOs: 49-89.

11. A nucleic acid molecule comprising a nucleic acid sequence encoding a fusion protein of claim 1.

12. A composition comprising the fusion protein of claim 1 or a nucleic acid molecule encoding the fusion protein

13. The composition of claim 12, wherein the composition further comprises one or more targeting nucleic acid molecules.

14. The composition of claim 13, wherein the targeting nucleic acid molecule is a CRISPR guide RNA (crRNA).

15. The composition of claim 14, wherein the composition further comprises a targeting DNA oligo.

16. A fusion protein comprising:
a) a CRISPR-associated (Cas) protein; and
b) an s-protein.

17. The fusion protein of claim 16, wherein the Cas protein is catalytically dead Cas13 (dCas13).

18. The fusion protein of claim 17, wherein dCas13 comprises a sequence selected from SEQ ID NOs: 47-48, or a variant thereof.

19. The fusion protein of claim 16, wherein the s-protein comprises a sequence selected from SEQ ID NOs: 90, 93, and 96, or a variant thereof.

20. The fusion protein of claim 16, wherein the fusion protein further comprises a nuclear localization signal (NLS)

21. The fusion protein of claim 20, wherein NLS comprises a sequence selected from SEQ ID NOs: 110-730, or a variant thereof.

22. The fusion protein of any of claims 16-21, wherein the fusion protein comprises a sequence selected from SEQ ID NOs:732 and 733, and a sequence selected from SEQ ID NOs: 90, 93, and 96.

23. A nucleic acid molecule comprising a nucleic acid sequence encoding a fusion protein of claim 16.

24. A composition comprising the fusion protein of claim 16 or a nucleic acid molecule encoding the fusion protein.

25. The composition of claim 23, wherein the composition further comprises a s-peptide.

26. The composition of claim 25, wherein the s-peptide comprises a sequence selected from SEQ ID NOs: 83, 84, 86, 87, 89 and 90, or a variant thereof

27. The composition of claim 24, wherein the composition further comprises one or more targeting nucleic acid molecules.

28. The composition of claim 27, wherein the targeting nucleic acid molecule is a CRISPR guide RNA (crRNA).

29. A method of decreasing the number of a RNA transcript or cleaving RNA transcript in a subject, the method comprising administering to the subject:
(a) a composition comprising a fusion protein comprising a CRISPR-associated (Cas) protein; and a RNase protein; or a nucleic acid molecule encoding the fusion protein; or
(b) a composition comprising a fusion protein comprising a CRISPR-associated (Cas) protein; and an s-protein; or a nucleic acid molecule encoding the fusion protein; and
and a guide nucleic acid comprising a sequence complimentary to a target RNA sequence in the RNA transcript.

30. The method of claim 23 being either an in vitro or in vivo method.

31. A method of treating a disease or disorder associated with RNA in a subject, the method comprising administering to the subject:
(a) a composition comprising a fusion protein comprising a CRISPR-associated (Cas) protein; and a RNase protein; or a nucleic acid molecule encoding the fusion protein; or
(b) a composition comprising a fusion protein comprising a CRISPR-associated (Cas) protein; and an s-protein; or a nucleic acid molecule encoding the fusion protein; and a guide nucleic acid comprising a sequence complimentary to a target RNA sequence in the RNA transcript.

32. The method of claim 31, wherein the disease or disorder is Myotonic Dystrophy or an RNA virus infection.
